(19) United States
(12) Patent Application Publication
(10) Pub. No.: US 2022/0275389 A1
(43) Pub. Date: Sep. 1, 2022

(54) MODIFIED EXOPOLYSACCHARIDE RECEPTORS FOR RECOGNIZING AND STRUCTURING MICROBIOTA

(71) Applicant: Aarhus Universitet, Aarhus C (DK)

(72) Inventors: Kasper Røjkjær ANDERSEN, Aarhus C (DK); Simon KELLY, Aarhus C (DK); Mei Mei Jaslyn Elizabeth WONG, Aarhus C (DK); Kira GYSEL, Aarhus C (DK); Simona RADUTOIU, Aarhus C (DK); Ke TAO, Aarhus C (DK); Simon Boje HANSEN, Aarhus C (DK); Jens STOUGAARD, Aarhus C (DK); Sha ZHANG, Aarhus C (DK)

(73) Assignee: Aarhus Universitet, Aarhus C (DK)

(21) Appl. No.: 17/631,692

(22) PCT Filed: Aug. 19, 2020
(86) PCT No.: PCT/EP2020/073164

§ 371 Date: Jan. 31, 2022

Related U.S. Application Data
(60) Provisional application No. 62/888,944, filed on Aug. 19, 2019.

(51) Int. Cl. C12N 15/82; C07K 14/415

(52) U.S. Cl. CPC C12N 15/8261; C07K 14/415

(57) ABSTRACT

Aspects of the present disclosure relate to genetically altered plants having a heterologous EPR3 or EPR3-like polypeptide or a modified EPR3 or EPR3-like polypeptide and/or having a heterologous EPR3a or EPR3a-like polypeptide or a modified EPR3a or EPR3a-like polypeptide, wherein the EPR3 or EPR3-like polypeptide and/or the EPR3a or EPR3a-like polypeptide provide increased selectivity for a beneficial commensal microbe as compared to a wild-type plant under the same conditions. Other aspects of the present disclosure relate to methods of making such plants as well as cultivating these genetically altered plants. Additional aspects of the present disclosure relate to methods of identifying a beneficial commensal microbe capable of interacting with a plant root microbiota.

### CROSS-REFERENCE TO RELATED APPLICATION

[0001] This application claims the benefit of U.S. Provisional Application No. 62/888,944, filed Aug. 19, 2019, which is hereby incorporated by reference in its entirety.

### SUBMISSION OF SEQUENCE LISTING AS ASCII TEXT FILE

[0002] The content of the following submission on ASCII text file is incorporated herein by reference in its entirety: a computer readable form (CRF) of the Sequence Listing (file name: 794542000940SEQLIST.TXT, date recorded: Aug. 13, 2020, size: 723 KB).

### TECHNICAL FIELD

[0003] The present disclosure relates to genetically altered plants. In particular, the present disclosure relates to genetically altered plants with a heterologous EPR3 or EPR3-like polypeptide or a modified EPR3 or EPR3-like polypeptide and/or with a heterologous EPR3a or EPR3a-like polypeptide or a modified EPR3a or EPR3a-like polypeptide, wherein the EPR3 or EPR3-like polypeptide and/or the EPR3a or EPR3a-like polypeptide provide increased selectivity for a beneficial commensal microbe as compared to a wild-type plant under the same conditions.

### BACKGROUND

[0004] Microbes produce extracellular polysaccharides, such as lipopolysaccharides and exopolysaccharides (EPS), which can be displayed on their surface or secreted into their environment. These polysaccharides are characteristic of the microbial species that produces them and can therefore be used as microbial associated molecular patterns for receptor-mediated recognition by mammals and plants.

[0005] One example of this recognition is found in legumes, which monitor the molecular composition of EPS of the surrounding soil to determine whether symbiosis pathways in the plant for rhizobial bacteria should be blocked or promoted. Symbiosis between legumes and rhizobia that fix nitrogen is governed by a two-step receptor-mediated recognition system. In the first step, rhizobial lipo-chitooligosaccharides (LCOs, also referred to as Nod factors) are perceived by plant LCO receptors. This perception induces the development of root nodule primordia, the entrapment of rhizobia in root hair curls, and triggers the plant program for bacterial infection. In the second step, rhizobial EPS are perceived, and this controls subsequent progression of nodule infection. In the legume Lotus japonicus, the single-pass transmembrane receptor-kinase EPR3 recognizes the R7A EPS produced by the Lotus symbiont Mesorhizobium loti. Studies of rhizobia and host plant mutants have showed that EPS perception, and subsequent EPR3 signaling, promote infection of the epidermal and cortical tissues of Lotus roots (Kawaharada, Y. et al. Nature 2015 523: 308-312; Kawaharada, Y. et al. Nat Commun 2017 8: 14534). In the absence of the correct R7A EPS, rhizobial infection and colonization are blocked in an EPR3-dependent manner (Kawaharada, Y. et al. Nature 2015 523: 308-312; Kelly, S. J. et al. Mol. Plant Microbe Interact 2013 26: 319-329), suggesting that EPS perception determines compatibility in legume-rhizobia interactions. These results, however, characterize the role of EPS perception in a limited context and primarily as a secondary gate on the symbiotic process with nitrogen fixing rhizobia. Many plant species, including most crop plants, do not establish nitrogen-fixing symbiosis, but instead have less well characterized plant-microbial interactions in the form of complex plant-associated microbial communities (microbiota).

[0006] Beyond just nitrogen-fixation symbiosis, soil-borne microbes can improve plant fitness by increasing nutrient availability, conferring pathogen resistance, and improving resilience to abiotic stresses. While recent studies have improved the understanding of the plant microbiota, the principles guiding if and how plants select for microbiota and encourage a healthy microbiota in the local soil space are largely unknown. Moreover, the role of EPS perception in the selection of microbiota has remained unknown. The microbiota that associate with healthy plants in nature have great potential for use in sustainable agriculture. Without a better understanding of the mechanisms used by plants to select microbiota, these promising resources will remain untapped.

### BRIEF SUMMARY

[0007] In order to better understand the role of EPR3 in EPS perception during nitrogen-fixation symbiosis, a crystal structure of EPR3 was determined. Surprisingly, this crystal structure identified EPR3 as a member of a new class of EPS receptors that shared the same overall architecture and was conserved in dicots (legumes and non-legumes) as well as in monocots (e.g., cereals) demonstrating that this new class of receptors must have a larger role than merely as a second gate in symbiosis with nitrogen-fixing bacteria. Further, an EPR3 receptor homolog, EPR3a, was identified in L. japonicus, and surprisingly shown to also be important for the bacterial infection process in root nodulation. In addition, it was also surprisingly found that epr3 mutant L. japonicus plants had significantly reduced fitness when grown in natural soil, and that these mutant plants assembled a bacterial community distinct from that of wild-type plants. These results indicated that EPS signaling through this new class of EPR3 receptors was crucial for plant growth in a microbe-rich environment, and that the larger role for this new class of EPR3 receptors was for selection of beneficial commensal microbes to organize a healthy microbiota around the roots and rhizosphere of plants generally. The surprising identification of a new class of EPS receptors conserved across dicots and monocots, the identification of the EPR3 receptor homolog EPR3a, and the role of EPR3-mediated EPS signaling in selecting microbiota identified by the inventors serves as the basis for many of the aspects and their various embodiments of the present disclosure.

[0008] This determination of the role of the EPR3 and EPR3a receptors will allow persons of skill in the art to genetically alter plants to allow the plant to recognize and select for different beneficial commensal microbes, for example by adding a heterologous EPR3 or EPR3a receptor from a plant that recognizes and selects for the different beneficial commensal microbes or by modification of the ectodomain of the endogenous EPR3 or EPR3a receptors to alter the selectivity for a select beneficial commensal microbe. In addition, this determination allows one of skill in the art to identify beneficial commensal microbes that can interact with a plant by screening beneficial commensal microbes or samples of their exopolysaccharides for the ability to bind to the EPR3 or EPR3a receptor ectodomain or to induce signaling. These beneficial commensal microbes can then be used to enhance cultivation of the plant through seed treatments and the like.

[0009] An aspect of the disclosure includes a genetically altered plant or part thereof including a first nucleic acid sequence encoding a heterologous EPR3 or EPR3-like polypeptide or a modified EPR3 or EPR3-like polypeptide, wherein the heterologous EPR3 or EPR3-like polypeptide or the modified EPR3 or EPR3-like polypeptide provides increased selectivity for a beneficial commensal microbe as compared to a wild-type plant under the same conditions. An additional embodiment of this aspect includes the plant or part thereof further including a second nucleic acid sequence encoding a heterologous EPR3a or EPR3a-like polypeptide or a modified EPR3a or EPR3a-like polypeptide. In a further embodiment of this aspect, which may be combined with any of the preceding embodiments, the heterologous EPR3 or EPR3-like polypeptide is selected from the group of a first polypeptide with at least 70% sequence identity, at least 75% sequence identity, at least 80% sequence identity, at least 85% sequence identity, at least 90% sequence identity, at least 95% sequence identity, at least 96% sequence identity, at least 97% sequence identity, at least 98% sequence identity, or at least 99% sequence identity to SEQ ID NO: 1 [L. japonicus (BAI79269.1)], a second polypeptide with at least 70% sequence identity, at least 75% sequence identity, at least 80% sequence identity, at least 85% sequence identity, at least 90% sequence identity, at least 95% sequence identity, at least 96% sequence identity, at least 97% sequence identity, at least 98% sequence identity, or at least 99% sequence identity to SEQ ID NO: 2 [Chickpea (XP_004489790.1)], a third polypeptide with at least 70% sequence identity, at least 75% sequence identity, at least 80% sequence identity, at least 85% sequence identity, at least 90% sequence identity, at least 95% sequence identity, at least 96% sequence identity, at least 97% sequence identity, at least 98% sequence identity, or at least 99% sequence identity to SEQ ID NO: 3 [Medicago (XP_003613165.1)], a fourth polypeptide with at least 70% sequence identity, at least 75% sequence identity, at least 80% sequence identity, at least 85% sequence identity, at least 90% sequence identity, at least 95% sequence identity, at least 96% sequence identity, at least 97% sequence identity, at least 98% sequence identity, or at least 99% sequence identity to SEQ ID NO: 4 [Soybean (XP_003517716.1)], a fifth polypeptide with at least 70% sequence identity, at least 75% sequence identity, at least 80% sequence identity, at least 85% sequence identity, at least 90% sequence identity, at least 95% sequence identity, at least 96% sequence identity, at least 97% sequence identity, at least 98% sequence identity, or at least 99% sequence identity to SEQ ID NO: 5 [Phaseolus (XP_007157313.1)], a sixth polypeptide with at least 70% sequence identity, at least 75% sequence identity, at least 80% sequence identity, at least 85% sequence identity, at least 90% sequence identity, at least 95% sequence identity, at least 96% sequence identity, at least 97% sequence identity, at least 98% sequence identity, or at least 99% sequence identity to SEQ ID NO: 6 [Populus (XP_002322185.1)], a seventh polypeptide with at least 70% sequence identity, at least 75% sequence identity, at least 80% sequence identity, at least 85% sequence identity, at least 90% sequence identity, at least 95% sequence identity, at least 96% sequence identity, at least 97% sequence identity, at least 98% sequence identity, or at least 99% sequence identity to SEQ ID NO: 7 [Malus (XP_008340354.1)], an eighth polypeptide with at least 70% sequence identity, at least 75% sequence identity, at least 80% sequence identity, at least 85% sequence identity, at least 90% sequence identity, at least 95% sequence identity, at least 96% sequence identity, at least 97% sequence identity, at least 98% sequence identity, or at least 99% sequence identity to SEQ ID NO: 8 [Vitis (XP_002272814.2)], a ninth polypeptide with at least 70% sequence identity, at least 75% sequence identity, at least 80% sequence identity, at least 85% sequence identity, at least 90% sequence identity, at least 95% sequence identity, at least 96% sequence identity, at least 97% sequence identity, at least 98% sequence identity, or at least 99% sequence identity to SEQ ID NO: 9 [Theobroma (XP_007036352.1)], a tenth polypeptide with at least 70% sequence identity, at least 75% sequence identity, at least 80% sequence identity, at least 85% sequence identity, at least 90% sequence identity, at least 95% sequence identity, at least 96% sequence identity, at least 97% sequence identity, at least 98% sequence identity, or at least 99% sequence identity to SEQ ID NO: 10 [Ricinus (XP_002527912.1)], an eleventh polypeptide with at least 70% sequence identity, at least 75% sequence identity, at least 80% sequence identity, at least 85% sequence identity, at least 90% sequence identity, at least 95% sequence identity, at least 96% sequence identity, at least 97% sequence identity, at least 98% sequence identity, or at least 99% sequence identity to SEQ ID NO: 11 [Fragaria (XP_004300916.1)], a twelfth polypeptide with at least 70% sequence identity, at least 75% sequence identity, at least 80% sequence identity, at least 85% sequence identity, at least 90% sequence identity, at least 95% sequence identity, at least 96% sequence identity, at least 97% sequence identity, at least 98% sequence identity, or at least 99% sequence identity to SEQ ID NO: 12 [Maize (XP_008657477.1)], a thirteenth polypeptide with at least 70% sequence identity, at least 75% sequence identity, at least 80% sequence identity, at least 85% sequence identity, at least 90% sequence identity, at least 95% sequence identity, at least 96% sequence identity, at least 97% sequence identity, at least 98% sequence identity, or at least 99% sequence identity to SEQ ID NO: 13 [Rice (XP_015628733.1)], a fourteenth polypeptide with at least 70% sequence identity, at least 75% sequence identity, at least 80% sequence identity, at least 85% sequence identity, at least 90% sequence identity, at least 95% sequence identity, at least 96% sequence identity, at least 97% sequence identity, at least 98% sequence identity, or at least 99% sequence identity to SEQ ID NO: 14 [Wheat (CDM80098.1)], or a fifteenth polypeptide with at least 70% sequence identity, at least 75% sequence identity, at least 80% sequence identity, at least 85% sequence identity, at least 90% sequence identity, at least 95% sequence identity, at least 96% sequence identity, at least 97% sequence identity, at least 98% sequence identity, or at least 99% sequence identity to SEQ ID NO: 15 [Barley (MLOC_5489.2)]. Yet another embodiment of this aspect includes the heterologous EPR3 or EPR3-like polypeptide being selected from the group of SEQ ID NO: 1 [L. japonicus (EPR3)], SEQ ID NO: 2 [Chickpea (XP_004489790.1)], SEQ ID NO: 3 [Medicago (XP_003613165.1)], SEQ ID NO: 4 [Soybean (XP_003517716.1)], SEQ ID NO: 5 [Phaseolus (XP_007157313.1)], SEQ ID NO: 6 [Populus (XP_002322185.1)], SEQ ID NO: 7 [Malus (XP_008340354.1)], SEQ ID NO: 8 [Vitis (XP_002272814.2)], SEQ ID NO: 9 [Theobroma (XP_007036352.1)], SEQ ID NO: 10 [Ricinus (XP_002527912.1)], SEQ ID NO: 11 [Fragaria (XP_004300916.1)], SEQ ID NO: 12 [Maize (XP_008657477.1)], SEQ ID NO: 13 [Rice (XP_015628733.1)], SEQ ID NO: 14 [Wheat (CDM80098.1)], or SEQ ID NO: 15 [Barley (MLOC_5489.2)]. Still another embodiment of this aspect, which may be combined with any of the preceding embodiments that has a heterologous EPR3a or EPR3a-like polypeptide, the heterologous EPR3a or EPR3a-like polypeptide is selected from the group of a polypeptide with at least 70% sequence identity, at least 75% sequence identity, at least 80% sequence identity, at least 85% sequence identity, at least 90% sequence identity, at least 95% sequence identity, at least 96% sequence identity, at least 97% sequence identity, at least 98% sequence identity, or at least 99% sequence identity to SEQ ID NO: 62 [L. japonicus (EPR3a)], SEQ ID NO: 63, SEQ ID NO: 64, SEQ ID NO: 65, SEQ ID NO: 66, SEQ ID NO: 67, SEQ ID NO: 68, SEQ ID NO: 69, SEQ ID NO: 70, SEQ ID NO: 71, SEQ ID NO: 72, SEQ ID NO: 73, SEQ ID NO: 74, SEQ ID NO: 75, SEQ ID NO: 76, SEQ ID NO: 77, SEQ ID NO: 78, SEQ ID NO: 79, SEQ ID NO: 80, SEQ ID NO: 81, SEQ ID NO: 82, SEQ ID NO: 83, SEQ ID NO: 84, SEQ ID NO: 85, SEQ ID NO: 86, SEQ ID NO: 87, SEQ ID NO: 88, SEQ ID NO: 89, SEQ ID NO: 90, SEQ ID NO: 91, or SEQ ID NO: 92. A further embodiment of this aspect includes the heterologous EPR3a or EPR3a-like polypeptide being SEQ ID NO: 62 [L. japonicus (EPR3a)], SEQ ID NO: 63, SEQ ID NO: 64, SEQ ID NO: 65, SEQ ID NO: 66, SEQ ID NO: 67, SEQ ID NO: 68, SEQ ID NO: 69, SEQ ID NO: 70, SEQ ID NO: 71, SEQ ID NO: 72, SEQ ID NO: 73, SEQ ID NO: 74, SEQ ID NO: 75, SEQ ID NO: 76, SEQ ID NO: 77, SEQ ID NO: 78, SEQ ID NO: 79, SEQ ID NO: 80, SEQ ID NO: 81, SEQ ID NO: 82, SEQ ID NO: 83, SEQ ID NO: 84, SEQ ID NO: 85, SEQ ID NO: 86, SEQ ID NO: 87, SEQ ID NO: 88, SEQ ID NO: 89, SEQ ID NO: 90, SEQ ID NO: 91, or SEQ ID NO: 92.

[0010] Still another embodiment of this aspect, which may be combined with any of the preceding embodiments, the modified EPR3 or EPR3-like polypeptide comprises a modified ectodomain that has been replaced with all or a portion of an ectodomain of the heterologous EPR3 or EPR3-like polypeptide, optionally all or a part of the M1 domain, the M2 domain, the LysM3 domain, or all three. In an additional embodiment of this aspect, the portion replaced is at least 10%, at least 20%, at least 30%, at least 40%, at least 50%, at least 60%, at least 70%, at least 80%, at least 90%, less than 10%, less than 20%, less than 30%, less than 40%, less than 50%, less than 60%, less than 70%, less than 80%, or less than 90%, of the ectodomain or, optionally all or a part of the M1 domain, the M2 domain, the LysM3 domain, or all three. In yet another embodiment of this aspect, which may be combined with any of the preceding embodiments that have an EPR3a or EPR3a-like polypeptide, the modified EPR3a or EPR3a-like polypeptide includes a modified ectodomain that has been replaced with all or a portion of an ectodomain of the heterologous EPR3a or EPR3a-like polypeptide, optionally all or a part of the M1 domain, the M2 domain, the LysM3 domain, or all three. In an additional embodiment of this aspect, the portion replaced is at least 10%, at least 20%, at least 30%, at least 40%, at least 50%, at least 60%, at least 70%, at least 80%, at least 90%, less than 10%, less than 20%, less than 30%, less than 40%, less than 50%, less than 60%, less than 70%, less than 80%, or less than 90%, of the ectodomain or, optionally all or a part of the M1 domain, the M2 domain, the LysM3 domain, or all three. A further embodiment of this aspect, which may be combined with any of the preceding embodiments that have an EPR3a or EPR3a-like polypeptide, includes the heterologous EPR3 or EPR3-like polypeptide and the heterologous EPR3a or EPR3a-like polypeptide being from the same plant species or the same plant variety.

[0011] Yet another embodiment of this aspect, which may be combined with any of the preceding embodiments, includes the expression of the heterologous EPR3 or EPR3-like polypeptide or the modified EPR3 or EPR3-like polypeptide allowing the plant or part thereof to recognize an exopolysaccharide (EPS), a beta-glucan, a cyclic beta-glucan, a LPS, or a surface carbohydrate produced by the microbe. Still another embodiment of this aspect, which may be combined with any of the preceding embodiments that have an EPR3a or EPR3a-like polypeptide, includes the expression of the heterologous EPR3a or EPR3a-like polypeptide or the modified EPR3a or EPR3a-like polypeptide allowing the plant or part thereof to recognize an EPS, a beta-glucan, a cyclic beta-glucan, a LPS, or a surface carbohydrate produced by the microbe. In a further embodiment of this aspect, the expression of the heterologous EPR3 or EPR3-like polypeptide or the modified EPR3 or EPR3-like polypeptide and the expression of the heterologous EPR3a or EPR3a-like polypeptide or the modified EPR3a or EPR3a-like polypeptide allows the plant or part thereof to recognize an EPS, a beta-glucan, a cyclic beta-glucan, a LPS, or a surface carbohydrate produced by the microbe. In an additional embodiment of this aspect that can be combined with any preceding embodiments including an EPS produced by the microbe, the microbe being a commensal bacteria, optionally a nitrogen-fixing bacteria, or a mycorrhizal fungi. A further embodiment of this aspect includes the nitrogen-fixing bacteria being selected from the group of Mesorhizobium loti, Mesorhizobium huakuii, Mesorhizobium mediterraneum, Mesorhizobium ciceri, Mesorhizobium spp., Rhizobium mongolense, Rhizobium tropici, Rhizobium etli phaseoli, Rhizobium giardinii, Rhizobium leguminosarum optionally R. leguminosarum trifolii, R. leguminosarum viciae, and R. leguminosarum phaseoli, Burkholderiales optionally symbionts of Mimosa, Sinorhizobium meliloti, Sinorhizobium medicae, Sinorhizobium fredii, Sinorhizobium fredii NGR234, Azorhizobium caulinodans, Bradyrhizobium japonicum, Bradyrhizobium elkanii, Bradyrhizobium liaonginense, Rhizobium spp., Mesorhizobium spp., Sinorhizobium spp., Azorhizobium spp. Frankia spp., or any combination thereof, or the mycorrhizal fungi being selected from the group of Acaulosporaceae spp., Diversisporaceae spp., Gigasporaceae spp., Pacisporaceae spp., Funneliformis spp., Glomus spp., Rhizophagus spp., Sclerocystis spp., Septoglomus spp., Claroideoglomus spp., Ambispora spp., Archaeospora spp., Geosiphon pyriformis, Paraglomus spp., other species in the division Glomeromycota, or any combination thereof. Still another embodiment of this aspect, which may be combined with any preceding embodiments, includes the heterologous EPR3 or EPR3-like polypeptide or the modified EPR3 or EPR3-like polypeptide being localized to a plant cell plasma membrane. Yet another embodiment of this aspect, which may be combined with any of the preceding embodiments that have an EPR3a or EPR3a-like polypeptide, includes the heterologous EPR3a or EPR3a-like polypeptide or the modified EPR3a or EPR3a-like polypeptide being localized to a plant cell plasma membrane. A further embodiment of this aspect that can be combined with any of the preceding embodiments that have localization to a plant cell plasma membrane includes the plant cell being a root cell. An additional embodiment of this aspect includes the root cell being a root epidermal cell or a root cortex cell. In a further embodiment of this aspect that can be combined with any of the preceding embodiments, the heterologous EPR3 or EPR3-like polypeptide or the modified EPR3 or EPR3-like polypeptide is expressed in a developing plant root system. In an additional embodiment of this aspect that can be combined with any of the preceding embodiments that has an EPR3a or EPR3a-like polypeptide, the heterologous EPR3a or EPR3a-like polypeptide or the modified EPR3a or EPR3a-like polypeptide is expressed in a developing plant root system.

[0012] In still another embodiment of this aspect, which may be combined with any of the preceding embodiments, the first nucleic acid sequence is operably linked to a first promoter. In an additional embodiment of this aspect, the first promoter is a root specific promoter, and the root specific promoter is optionally selected from the group of a NFR1 or NFR5/NFP promoter, an EPR3 or an EPR3a promoter, a Lotus NFR5 promoter, a Lotus NFR1 promoter, a maize allothioneine promoter, a chitinase promoter, a maize ZRP2 promoter, a tomato LeExt1 promoter, a glutamine synthetase soybean root promoter, a RCC3 promoter, a rice antiquitine promoter, a LRR receptor kinase promoter, or an Arabidopsis pCO2 promoter. In a further embodiment of this aspect, the first promoter is a constitutive promoter, and the constitutive promoter is optionally selected from the group of a CaMV35S promoter, a derivative of the CaMV35S promoter, a maize ubiquitin promoter, a trefoil promoter, a vein mosaic cassava virus promoter, or an Arabidopsis UBQ10 promoter. In yet another embodiment of this aspect, which may be combined with any of the preceding embodiments that has an EPR3a or EPR3a-like polypeptide, the second nucleic acid sequence is operably linked to a second promoter. In an additional embodiment of this aspect, the second promoter is a root specific promoter, and the root specific promoter is optionally selected from the group of a NFR1 or NFR5/NFP promoter, an EPR3 or an EPR3a promoter, a Lotus NFR5 promoter, a Lotus NFR1 promoter, a maize allothioneine promoter, a chitinase promoter, a maize ZRP2 promoter, a tomato LeExt1 promoter, a glutamine synthetase soybean root promoter, a RCC3 promoter, a rice antiquitine promoter, a LRR receptor kinase promoter, or an Arabidopsis pCO2 promoter. In a further embodiment of this aspect, the second promoter is a constitutive promoter, and the constitutive promoter is optionally selected from the group of a CaMV35S promoter, a derivative of the CaMV35S promoter, a maize ubiquitin promoter, a trefoil promoter, a vein mosaic cassava virus promoter, or an Arabidopsis UBQ10 promoter. In an additional embodiment of this aspect, which may be combined with any of the preceding embodiments, the plant is selected from the group of cassava, corn, cowpea, rice, barley, wheat, Trema spp., apple, pear, plum, apricot, peach, almond, walnut, strawberry, raspberry, blackberry, red currant, black currant, melon, cucumber, pumpkin, squash, grape, tomato, pepper, or hemp. In yet another embodiment of this aspect, which may be combined with any of the preceding embodiments, the plant lacks functional rhizobial Nod factor receptors. In still another embodiment of this aspect, which may be combined with any of the preceding embodiments, the plant is not a legume. In an additional embodiment of this aspect, which may be combined with any of the preceding embodiments, the plant is not A. thaliana, N. tabacum, L. japonicus, or M. truncatula. In a further embodiment of this aspect, which may be combined with any of the above embodiments, the plant part is a leaf, a stem, a root, a root primordia, a flower, a seed, a fruit, a kernel, a grain, a cell, or a portion thereof. An additional embodiment of this aspect includes the plant part being a fruit, a kernel, or a grain.

[0013] In some aspects, the present disclosure relates to a pollen grain or an ovule of the genetically altered plant of any of the above embodiments.

[0014] In some aspects, the present disclosure relates to a protoplast produced from the plant of any of the above embodiments.

[0015] In some aspects, the present disclosure relates to a tissue culture produced from protoplasts or cells from the plant of any of the above embodiments, wherein the cells or protoplasts are produced from a plant part selected from the group of leaf, anther, pistil, stem, petiole, root, root primordia, root tip, fruit, seed, flower, cotyledon, hypocotyl, embryo, or meristematic cell.

[0016] A further aspect of the present disclosure relates to methods of producing the genetically altered plant of any of the above embodiments, including introducing a genetic alteration to the plant comprising the first nucleic acid sequence encoding the heterologous EPR3 or EPR3-like polypeptide. An additional embodiment of this aspect includes the first nucleic acid sequence being operably linked to a first promoter. Yet another embodiment of this aspect includes the first promoter being a root specific promoter, and the root specific promoter being optionally selected from the group of a NFR1 or NFR5/NFP promoter, an EPR3 or an EPR3a promoter, a Lotus NFR5 promoter, a Lotus NFR1 promoter, a maize allothioneine promoter, a chitinase promoter, a maize ZRP2 promoter, a tomato LeExt1 promoter, a glutamine synthetase soybean root promoter, a RCC3 promoter, a rice antiquitine promoter, a LRR receptor kinase promoter, or an Arabidopsis pCO2 promoter. Still another embodiment of this aspect includes the first promoter being a constitutive promoter, and the constitutive promoter being optionally selected from the group of a CaMV35S promoter, a derivative of the CaMV35S promoter, a maize ubiquitin promoter, a trefoil promoter, a vein mosaic cassava virus promoter, or an Arabidopsis UBQ10 promoter. An additional embodiment of this aspect further includes introducing a genetic alteration to the plant including the second nucleic acid sequence encoding the heterologous EPR3a or EPR3a-like polypeptide. A further embodiment of this aspect includes the second nucleic acid sequence being operably linked to a second promoter. Yet another embodiment of this aspect includes the second promoter being a root specific promoter, and the root specific promoter being optionally selected from the group of a NFR1 or NFR5/NFP promoter, an EPR3 or an EPR3a promoter, a Lotus NFR5 promoter, a Lotus NFR1 promoter, a maize allothioneine promoter, a chitinase promoter, a maize ZRP2 promoter, a tomato LeExt1 promoter, a glutamine synthetase soybean root promoter, a RCC3 promoter, a rice antiquitine promoter, a LRR receptor kinase promoter, or an Arabidopsis pCO2 promoter. Still another embodiment of this aspect includes the second promoter being a constitutive promoter, and the constitutive promoter being optionally selected from the group consisting of a CaMV35S promoter, a derivative of the CaMV35S promoter, a maize ubiquitin promoter, a trefoil promoter, a vein mosaic cassava virus promoter, or an Arabidopsis UBQ10 promoter. In a further embodiment of this aspect, with may be combined with any of the preceding embodiments, the first nucleic acid sequence is inserted into the genome of the plant so that the nucleic acid sequence is operably linked to a first endogenous promoter. An additional embodiment of this aspect includes the first endogenous promoter being a root specific promoter. In yet another embodiment of this aspect, with may be combined with any of the preceding embodiments that has the second nucleic acid sequence, the second nucleic acid sequence is inserted into the genome of the plant so that the nucleic acid sequence is operably linked to a second endogenous promoter. A further embodiment of this aspect includes the second endogenous promoter being a root specific promoter.

[0017] An additional aspect of the present disclosure relates to methods of producing the genetically altered plant of any one of the preceding embodiments that have a modified polypeptide, including genetically editing a gene encoding an endogenous LysM receptor polypeptide in the plant to comprise the modified ectodomain. In a further embodiment of this aspect, the endogenous LysM receptor polypeptide is an endogenous EPR3 or EPR3-like polypeptide. In another embodiment of this aspect, which may be combined with any of the preceding embodiments, the modified EPR3 or EPR3-like polypeptide was generated by: (a) providing a heterologous EPR3 or EPR3-like polypeptide model including a structural model, a molecular model, a surface characteristics model, and/or an electrostatic potential model of a M1 domain, a M2 domain, a LysM3 domain, any combination thereof, or the ectodomain of the heterologous EPR3 or EPR3-like polypeptide having selectivity for the beneficial commensal microbe and an unmodified EPR3 or EPR3-like polypeptide; (b) identifying one or more amino acid residues for modification in the unmodified EPR3 or EPR3-like polypeptide by comparing amino acid residues of a oligosaccharide binding feature in the unmodified EPR3 or EPR3-like polypeptide with the corresponding amino acid residues in the heterologous EPR3 or EPR3-like polypeptide model; and (c) generating the unmodified EPR3 or EPR3-like polypeptide wherein the one or more amino acid residues in the oligosaccharide binding feature of the unmodified EPR3 or EPR3-like polypeptide have been substituted with corresponding amino acid residues from the heterologous EPR3 or EPR3-like polypeptide. Yet another embodiment of this aspect includes the heterologous EPR3 or EPR3-like polypeptide model being a protein crystal structure, a molecular model, a cryo-EM structure, or a NMR structure. In an additional embodiment of this aspect, the endogenous LysM receptor polypeptide is an endogenous EPR3a or EPR3a-like polypeptide. In another embodiment of this aspect, the modified EPR3a or EPR3a-like polypeptide was generated by: (a) providing a heterologous EPR3a or EPR3a-like polypeptide model including a structural model, a molecular model, a surface characteristics model, and/or an electrostatic potential model of a M1 domain, a M2 domain, a LysM3 domain, any combination thereof, or the ectodomain of the heterologous EPR3a or EPR3a-like polypeptide having selectivity for the beneficial commensal microbe and an unmodified EPR3a or EPR3a-like polypeptide; (b) identifying one or more amino acid residues for modification in the unmodified EPR3a or EPR3a-like polypeptide by comparing amino acid residues of a oligosaccharide binding feature in the unmodified EPR3a or EPR3a-like polypeptide with the corresponding amino acid residues in the heterologous EPR3a or EPR3a-like polypeptide model; and (c) generating the unmodified EPR3a or EPR3a-like polypeptide wherein the one or more amino acid residues in the oligosaccharide binding feature of the unmodified EPR3a or EPR3a-like polypeptide have been substituted with corresponding amino acid residues from the heterologous EPR3a or EPR3a-like polypeptide. Yet another embodiment of this aspect includes the heterologous EPR3a or EPR3a-like polypeptide model being a protein crystal structure, a molecular model, a cryo-EM structure, or a NMR structure. A further embodiment of this aspect that can be combined with any of the preceding embodiments includes a plant or plant part produced by the method of any one of the preceding embodiments.

[0018] An additional aspect of the disclosure includes a genetically altered plant or part thereof including a first nucleic acid sequence encoding a heterologous EPR3a or EPR3a-like polypeptide or a modified EPR3a or EPR3a-like polypeptide, wherein the heterologous EPR3a or EPR3a-like polypeptide or the modified EPR3a or EPR3a-like polypeptide provides increased selectivity for a beneficial commensal microbe as compared to a wild-type plant under the same conditions. An additional embodiment of this aspect includes the plant or part thereof further including a second nucleic acid sequence encoding a heterologous EPR3 or EPR3-like polypeptide or a modified EPR3 or EPR3-like polypeptide. In a further embodiment of this aspect, which may be combined with any of the preceding embodiments, the heterologous EPR3a or EPR3a-like polypeptide is selected from the group of a polypeptide with at least 70% sequence identity, at least 75% sequence identity, at least 80% sequence identity, at least 85% sequence identity, at least 90% sequence identity, at least 95% sequence identity, at least 96% sequence identity, at least 97% sequence identity, at least 98% sequence identity, or at least 99% sequence identity to SEQ ID NO: 62 [L. japonicus (EPR3a)], SEQ ID NO: 63, SEQ ID NO: 64, SEQ ID NO: 65, SEQ ID NO: 66, SEQ ID NO: 67, SEQ ID NO: 68, SEQ ID NO: 69, SEQ ID NO: 70, SEQ ID NO: 71, SEQ ID NO: 72, SEQ ID NO: 73, SEQ ID NO: 74, SEQ ID NO: 75, SEQ ID NO: 76, SEQ ID NO: 77, SEQ ID NO: 78, SEQ ID NO: 79, SEQ ID NO: 80, SEQ ID NO: 81, SEQ ID NO: 82, SEQ ID NO: 83, SEQ ID NO: 84, SEQ ID NO: 85, SEQ ID NO: 86, SEQ ID NO: 87, SEQ ID NO: 88, SEQ ID NO: 89, SEQ ID NO: 90, SEQ ID NO: 91, or SEQ ID NO: 92. A further embodiment of this aspect includes the heterologous EPR3a or EPR3a-like polypeptide being SEQ ID NO: 62 [L. japonicus (EPR3a)], SEQ ID NO: 63, SEQ ID NO: 64, SEQ ID NO: 65, SEQ ID NO: 66, SEQ ID NO: 67, SEQ ID NO: 68, SEQ ID NO: 69, SEQ ID NO: 70, SEQ ID NO: 71, SEQ ID NO: 72, SEQ ID NO: 73, SEQ ID NO: 74, SEQ ID NO: 75, SEQ ID NO: 76, SEQ ID NO: 77, SEQ ID NO: 78, SEQ ID NO: 79, SEQ ID NO: 80, SEQ ID NO: 81, SEQ ID NO: 82, SEQ ID NO: 83, SEQ ID NO: 84, SEQ ID NO: 85, SEQ ID NO: 86, SEQ ID NO: 87, SEQ ID NO: 88, SEQ ID NO: 89, SEQ ID NO: 90, SEQ ID NO: 91, or SEQ ID NO: 92. In still another embodiment of this aspect, which may be combined with any of the preceding embodiments having the heterologous EPR3 or EPR3-like polypeptide, the heterologous EPR3 or EPR3-like polypeptide is selected from the group of a polypeptide with at least 70% sequence identity, at least 75% sequence identity, at least 80% sequence identity, at least 85% sequence identity, at least 90% sequence identity, at least 95% sequence identity, at least 96% sequence identity, at least 97% sequence identity, at least 98% sequence identity, or at least 99% sequence identity to SEQ ID NO: 1 [L. japonicus (BAI79269.1)], a second polypeptide with at least 70% sequence identity, at least 75% sequence identity, at least 80% sequence identity, at least 85% sequence identity, at least 90% sequence identity, at least 95% sequence identity, at least 96% sequence identity, at least 97% sequence identity, at least 98% sequence identity, or at least 99% sequence identity to SEQ ID NO: 2 [Chickpea (XP_004489790.1)], a third polypeptide with at least 70% sequence identity, at least 75% sequence identity, at least 80% sequence identity, at least 85% sequence identity, at least 90% sequence identity, at least 95% sequence identity, at least 96% sequence identity, at least 97% sequence identity, at least 98% sequence identity, or at least 99% sequence identity to SEQ ID NO: 3 [Medicago (XP_003613165.1)], a fourth polypeptide with at least 70% sequence identity, at least 75% sequence identity, at least 80% sequence identity, at least 85% sequence identity, at least 90% sequence identity, at least 95% sequence identity, at least 96% sequence identity, at least 97% sequence identity, at least 98% sequence identity, or at least 99% sequence identity to SEQ ID NO: 4 [Soybean (XP_003517716.1)], a fifth polypeptide with at least 70% sequence identity, at least 75% sequence identity, at least 80% sequence identity, at least 85% sequence identity, at least 90% sequence identity, at least 95% sequence identity, at least 96% sequence identity, at least 97% sequence identity, at least 98% sequence identity, or at least 99% sequence identity to SEQ ID NO: 5 [Phaseolus (XP_007157313.1)], a sixth polypeptide with at least 70% sequence identity, at least 75% sequence identity, at least 80% sequence identity, at least 85% sequence identity, at least 90% sequence identity, at least 95% sequence identity, at least 96% sequence identity, at least 97% sequence identity, at least 98% sequence identity, or at least 99% sequence identity to SEQ ID NO: 6 [Populus (XP_002322185.1)], a seventh polypeptide with at least 70% sequence identity, at least 75% sequence identity, at least 80% sequence identity, at least 85% sequence identity, at least 90% sequence identity, at least 95% sequence identity, at least 96% sequence identity, at least 97% sequence identity, at least 98% sequence identity, or at least 99% sequence identity to SEQ ID NO: 7 [Malta (XP_008340354.1)], an eighth polypeptide with at least 70% sequence identity, at least 75% sequence identity, at least 80% sequence identity, at least 85% sequence identity, at least 90% sequence identity, at least 95% sequence identity, at least 96% sequence identity, at least 97% sequence identity, at least 98% sequence identity, or at least 99% sequence identity to SEQ ID NO: 8 [Vitis (XP_002272814.2)], a ninth polypeptide with at least 70% sequence identity, at least 75% sequence identity, at least 80% sequence identity, at least 85% sequence identity, at least 90% sequence identity, at least 95% sequence identity, at least 96% sequence identity, at least 97% sequence identity, at least 98% sequence identity, or at least 99% sequence identity to SEQ ID NO: 9 [Theobroma (XP_007036352.1)], a tenth polypeptide with at least 70% sequence identity, at least 75% sequence identity, at least 80% sequence identity, at least 85% sequence identity, at least 90% sequence identity, at least 95% sequence identity, at least 96% sequence identity, at least 97% sequence identity, at least 98% sequence identity, or at least 99% sequence identity to SEQ ID NO: 10 [Ricinus (XP_002527912.1)], an eleventh polypeptide with at least 70% sequence identity, at least 75% sequence identity, at least 80% sequence identity, at least 85% sequence identity, at least 90% sequence identity, at least 95% sequence identity, at least 96% sequence identity, at least 97% sequence identity, at least 98% sequence identity, or at least 99% sequence identity to SEQ ID NO: 11 [Fragaria (XP_004300916.1)], a twelfth polypeptide with at least 70% sequence identity, at least 75% sequence identity, at least 80% sequence identity, at least 85% sequence identity, at least 90% sequence identity, at least 95% sequence identity, at least 96% sequence identity, at least 97% sequence identity, at least 98% sequence identity, or at least 99% sequence identity to SEQ ID NO: 12 [Maize (XP_008657477.1)], a thirteenth polypeptide with at least 70% sequence identity, at least 75% sequence identity, at least 80% sequence identity, at least 85% sequence identity, at least 90% sequence identity, at least 95% sequence identity, at least 96% sequence identity, at least 97% sequence identity, at least 98% sequence identity, or at least 99% sequence identity to SEQ ID NO: 13 [Rice (XP_015628733.1)], a fourteenth polypeptide with at least 70% sequence identity, at least 75% sequence identity, at least 80% sequence identity, at least 85% sequence identity, at least 90% sequence identity, at least 95% sequence identity, at least 96% sequence identity, at least 97% sequence identity, at least 98% sequence identity, or at least 99% sequence identity to SEQ ID NO: 14 [Wheat (CDM80098.1)], or a fifteenth polypeptide with at least 70% sequence identity, at least 75% sequence identity, at least 80% sequence identity, at least 85% sequence identity, at least 90% sequence identity, at least 95% sequence identity, at least 96% sequence identity, at least 97% sequence identity, at least 98% sequence identity, or at least 99% sequence identity to SEQ ID NO: 15 [Barley (MLOC_5489.2)]. A further embodiment of this aspect includes the heterologous EPR3 or EPR3-like polypeptide being selected from the group of SEQ ID NO: 1 [L. japonicus (EPR3)], SEQ ID NO: 2 [Chickpea (XP_004489790.1)], SEQ ID NO: 3 [Medicago (XP_003613165.1)], SEQ ID NO: 4 [Soybean (XP_003517716.1)], SEQ ID NO: 5 [Phaseolus (XP_007157313.1)], SEQ ID NO: 6 [Populus (XP_002322185.1)], SEQ ID NO: 7 [Malus (XP_008340354.1)], SEQ ID NO: 8 [Vitis (XP_002272814.2)], SEQ ID NO: 9 [Theobroma (XP_007036352.1)], SEQ ID NO: 10 [Ricinus (XP_002527912.1)], SEQ ID NO: 11 [Fragaria (XP_004300916.1)], SEQ ID NO: 12 [Maize (XP_008657477.1)], SEQ ID NO: 13 [Rice (XP_015628733.1)], SEQ ID NO: 14 [Wheat (CDM80098.1)], or SEQ ID NO: 15 [Barley (MLOC_5489.2)].

[0019] Still another embodiment of this aspect, which may be combined with any of the preceding embodiments, the modified EPR3a or EPR3a-like polypeptide comprises a modified ectodomain that has been replaced with all or a portion of an ectodomain of the heterologous EPR3a or EPR3a-like polypeptide, optionally all or a part of the M1 domain, the M2 domain, the LysM3 domain, or all three. In an additional embodiment of this aspect, the portion replaced is at least 10%, at least 20%, at least 30%, at least 40%, at least 50%, at least 60%, at least 70%, at least 80%, at least 90%, less than 10%, less than 20%, less than 30%, less than 40%, less than 50%, less than 60%, less than 70%, less than 80%, or less than 90%, of the ectodomain or, optionally all or a part of the M1 domain, the M2 domain, the LysM3 domain, or all three. In yet another embodiment of this aspect, which may be combined with any of the preceding embodiments that have an EPR3 or EPR3-like polypeptide, the modified EPR3 or EPR3-like polypeptide includes a modified ectodomain that has been replaced with all or a portion of an ectodomain of the heterologous EPR3 or EPR3-like polypeptide, optionally all or a part of the M1 domain, the M2 domain, the LysM3 domain, or all three. In an additional embodiment of this aspect, the portion replaced is at least 10%, at least 20%, at least 30%, at least 40%, at least 50%, at least 60%, at least 70%, at least 80%, at least 90%, less than 10%, less than 20%, less than 30%, less than 40%, less than 50%, less than 60%, less than 70%, less than 80%, or less than 90%, of the ectodomain or, optionally all or a part of the M1 domain, the M2 domain, the LysM3 domain, or all three. A further embodiment of this aspect, which may be combined with any of the preceding embodiments that have an EPR3 or EPR3-like polypeptide, includes the heterologous EPR3a or EPR3a-like polypeptide and the heterologous EPR3 or EPR3-like polypeptide being from the same plant species or the same plant variety.

[0020] Yet another embodiment of this aspect, which may be combined with any of the preceding embodiments, includes the expression of the heterologous EPR3a or EPR3a-like polypeptide or the modified EPR3a or EPR3a-like polypeptide allowing the plant or part thereof to recognize an EPS, a beta-glucan, a cyclic beta-glucan, a LPS, or a surface carbohydrate produced by the microbe. Still another embodiment of this aspect, which may be combined with any of the preceding embodiments that have an EPR3 or EPR3-like polypeptide, includes the expression of the heterologous EPR3 or EPR3-like polypeptide or the modified EPR3 or EPR3-like polypeptide allowing the plant or part thereof to recognize an EPS, a beta-glucan, a cyclic beta-glucan, a LPS, or a surface carbohydrate produced by the microbe. In a further embodiment of this aspect, the expression of the heterologous EPR3a or EPR3a-like polypeptide or the modified EPR3a or EPR3a-like polypeptide and the expression of the heterologous EPR3 or EPR3-like polypeptide or the modified EPR3 or EPR3-like polypeptide allows the plant or part thereof to recognize an EPS, a beta-glucan, a cyclic beta-glucan, a LPS, or a surface carbohydrate produced by the microbe. In an additional embodiment of this aspect that can be combined with any preceding embodiments including an EPS produced by the microbe, the microbe is a commensal bacteria, optionally a nitrogen-fixing bacteria, or a mycorrhizal fungi. A further embodiment of this aspect includes the nitrogen-fixing bacteria being selected from the group of Mesorhizobium loti, Mesorhizobium huakuii, Mesorhizobium mediterraneum, Mesorhizobium ciceri, Mesorhizobium spp., Rhizobium mongolense, Rhizobium tropici, Rhizobium etli phaseoli, Rhizobium giardinii, Rhizobium leguminosarum optionally R. leguminosarum trifolii, R. leguminosarum viciae, and R. leguminosarum phaseoli, Burkholderiales optionally symbionts of Mimosa, Sinorhizobium meliloti, Sinorhizobium medicae, Sinorhizobium fredii, Sinorhizobium fredii NGR234, Azorhizobium caulinodans, Bradyrhizobium japonicum, Bradyrhizobium elkanii, Bradyrhizobium liaonginense, Rhizobium spp., Mesorhizobium spp., Sinorhizobium spp., Azorhizobium spp. Frankia spp., or any combination thereof, or the mycorrhizal fungi being selected from the group of Acaulosporaceae spp., Diversisporaceae spp., Gigasporaceae spp., Pacisporaceae spp., Funneliformis spp., Glomus spp., Rhizophagus spp., Sclerocystis spp., Septoglomus spp., Claroideoglomus spp., Ambispora spp., Archaeospora spp., Geosiphon pyriformis, Paraglomus spp., other species in the division Glomeromycota, or any combination thereof. Still another embodiment of this aspect, which may be combined with any preceding embodiments, includes the heterologous EPR3a or EPR3a-like polypeptide or the modified EPR3a or EPR3a-like polypeptide being localized to a plant cell plasma membrane. Yet another embodiment of this aspect, which may be combined with any of the preceding embodiments that have an EPR3 or EPR3-like polypeptide, includes the heterologous EPR3 or EPR3-like polypeptide or the modified EPR3 or EPR3-like polypeptide being localized to a plant cell plasma membrane. A further embodiment of this aspect that can be combined with any of the preceding embodiments that have localization to a plant cell plasma membrane includes the plant cell being a root cell. An additional embodiment of this aspect includes the root cell being a root epidermal cell or a root cortex cell. In a further embodiment of this aspect that can be combined with any of the preceding embodiments, the heterologous EPR3a or EPR3a-like polypeptide or the modified EPR3a or EPR3a-like polypeptide is expressed in a developing plant root system. In an additional embodiment of this aspect that can be combined with any of the preceding embodiments that has an EPR3 or EPR3-like polypeptide, the heterologous EPR3 or EPR3-like polypeptide or the modified EPR3 or EPR3-like polypeptide is expressed in a developing plant root system.

[0021] In still another embodiment of this aspect, which may be combined with any of the preceding embodiments, the first nucleic acid sequence is operably linked to a first promoter. In an additional embodiment of this aspect, the first promoter is a root specific promoter, and the root specific promoter is optionally selected from the group of a NFR1 or NFR5/NFP promoter, an EPR3 or an EPR3a promoter, a Lotus NFR5 promoter, a Lotus NFR1 promoter, a maize allothioneine promoter, a chitinase promoter, a maize ZRP2 promoter, a tomato LeExt1 promoter, a glutamine synthetase soybean root promoter, a RCC3 promoter, a rice antiquitine promoter, a LRR receptor kinase promoter, or an Arabidopsis pCO2 promoter. In a further embodiment of this aspect, the first promoter is a constitutive promoter, and the constitutive promoter is optionally selected from the group of a CaMV35S promoter, a derivative of the CaMV35S promoter, a maize ubiquitin promoter, a trefoil promoter, a vein mosaic cassava virus promoter, or an Arabidopsis UBQ10 promoter. In yet another embodiment of this aspect, which may be combined with any of the preceding embodiments that has an EPR3 or EPR3-like polypeptide, the second nucleic acid sequence is operably linked to a second promoter. In an additional embodiment of this aspect, the second promoter is a root specific promoter, and the root specific promoter is optionally selected from the group of a NFR1 or NFR5/NFP promoter, an EPR3 or an EPR3a promoter, a Lotus NFR5 promoter, a Lotus NFR1 promoter, a maize allothioneine promoter, a chitinase promoter, a maize ZRP2 promoter, a tomato LeExt1 promoter, a glutamine synthetase soybean root promoter, a RCC3 promoter, a rice antiquitine promoter, a LRR receptor kinase promoter, or an Arabidopsis pCO2 promoter. In a further embodiment of this aspect, the second promoter is a constitutive promoter, and the constitutive promoter is optionally selected from the group of a CaMV35S promoter, a derivative of the CaMV35S promoter, a maize ubiquitin promoter, a trefoil promoter, a vein mosaic cassava virus promoter, or an Arabidopsis UBQ10 promoter. In an additional embodiment of this aspect, which may be combined with any of the preceding embodiments, the plant is selected from the group of cassava, corn, cowpea, rice, barley, wheat, Trema spp., apple, pear, plum, apricot, peach, almond, walnut, strawberry, raspberry, blackberry, red currant, black currant, melon, cucumber, pumpkin, squash, grape, tomato, pepper, or hemp. In yet another embodiment of this aspect, which may be combined with any of the preceding embodiments, the plant lacks functional rhizobial Nod factor receptors. In still another embodiment of this aspect, which may be combined with any of the preceding embodiments, the plant is not a legume. In an additional embodiment of this aspect, which may be combined with any of the preceding embodiments, the plant is not A. thaliana, N. tabacum, L. japonicus, or/14. truncatula. In a further embodiment of this aspect, which may be combined with any of the above embodiments, the plant part is a leaf, a stem, a root, a root primordia, a flower, a seed, a fruit, a kernel, a grain, a cell, or a portion thereof. An additional embodiment of this aspect includes the plant part being a fruit, a kernel, or a grain.

[0022] In some aspects, the present disclosure relates to a pollen grain or an ovule of the genetically altered plant of any of the above embodiments.

[0023] In some aspects, the present disclosure relates to a protoplast produced from the plant of any of the above embodiments.

[0024] In some aspects, the present disclosure relates to a tissue culture produced from protoplasts or cells from the plant of any of the above embodiments, wherein the cells or protoplasts are produced from a plant part selected from the group of leaf, anther, pistil, stem, petiole, root, root primordia, root tip, fruit, seed, flower, cotyledon, hypocotyl, embryo, or meristematic cell.

[0025] A further aspect of the present disclosure relates to methods of producing the genetically altered plant of any of the above embodiments, including introducing a genetic alteration to the plant comprising the first nucleic acid sequence encoding the heterologous EPR3a or EPR3a-like polypeptide. An additional embodiment of this aspect includes the first nucleic acid sequence being operably linked to a first promoter. Yet another embodiment of this aspect includes the first promoter being a root specific promoter, and the root specific promoter being optionally selected from the group of a NFR1 or NFR5/NFP promoter, an EPR3 or an EPR3a promoter, a Lotus NFR5 promoter, a Lotus NFR1 promoter, a maize allothioneine promoter, a chitinase promoter, a maize ZRP2 promoter, a tomato LeExt1 promoter, a glutamine synthetase soybean root promoter, a RCC3 promoter, a rice antiquitine promoter, a LRR receptor kinase promoter, or an Arabidopsis pCO2 promoter. Still another embodiment of this aspect includes the first promoter being a constitutive promoter, and the constitutive promoter being optionally selected from the group of a CaMV35S promoter, a derivative of the CaMV35S promoter, a maize ubiquitin promoter, a trefoil promoter, a vein mosaic cassava virus promoter, or an Arabidopsis UBQ10 promoter. An additional embodiment of this aspect further includes introducing a genetic alteration to the plant including the second nucleic acid sequence encoding the heterologous EPR3 or EPR3-like polypeptide. A further embodiment of this aspect includes the second nucleic acid sequence being operably linked to a second promoter. Yet another embodiment of this aspect includes the second promoter being a root specific promoter, and the root specific promoter being optionally selected from the group of a NFR1 or NFR5/NFP promoter, an EPR3 or an EPR3a promoter, a Lotus NFR5 promoter, a Lotus NFR1 promoter, a maize allothioneine promoter, a chitinase promoter, a maize ZRP2 promoter, a tomato LeExt1 promoter, a glutamine synthetase soybean root promoter, a RCC3 promoter, a rice antiquitine promoter, a LRR receptor kinase promoter, or an Arabidopsis pCO2 promoter. Still another embodiment of this aspect includes the second promoter being a constitutive promoter, and the constitutive promoter being optionally selected from the group consisting of a CaMV35S promoter, a derivative of the CaMV35S promoter, a maize ubiquitin promoter, a trefoil promoter, a vein mosaic cassava virus promoter, or an Arabidopsis UBQ10 promoter. In a further embodiment of this aspect, with may be combined with any of the preceding embodiments, the first nucleic acid sequence is inserted into the genome of the plant so that the nucleic acid sequence is operably linked to a first endogenous promoter. An additional embodiment of this aspect includes the first endogenous promoter being a root specific promoter. In yet another embodiment of this aspect, with may be combined with any of the preceding embodiments that has the second nucleic acid sequence, the second nucleic acid sequence is inserted into the genome of the plant so that the nucleic acid sequence is operably linked to a second endogenous promoter. A further embodiment of this aspect includes the second endogenous promoter being a root specific promoter.

[0026] An additional aspect of the present disclosure relates to methods of producing the genetically altered plant of any one of the preceding embodiments that have a modified polypeptide, including genetically editing a gene encoding an endogenous LysM receptor polypeptide in the plant to comprise the modified ectodomain. In a further embodiment of this aspect, the endogenous LysM receptor polypeptide is an endogenous EPR3a or EPR3a-like polypeptide. In another embodiment of this aspect, which may be combined with any of the preceding embodiments, the modified EPR3a or EPR3a-like polypeptide was generated by: (a) providing a heterologous EPR3a or EPR3a-like polypeptide model including a structural model, a molecular model, a surface characteristics model, and/or an electrostatic potential model of a M1 domain, a M2 domain, a LysM3 domain, any combination thereof, or the ectodomain of the heterologous EPR3a or EPR3a-like polypeptide having selectivity for the beneficial commensal microbe and an unmodified EPR3a or EPR3a-like polypeptide; (b) identifying one or more amino acid residues for modification in the unmodified EPR3a or EPR3a-like polypeptide by comparing amino acid residues of a oligosaccharide binding feature in the unmodified EPR3a or EPR3a-like polypeptide with the corresponding amino acid residues in the heterologous EPR3a or EPR3a-like polypeptide model; and (c) generating the unmodified EPR3a or EPR3a-like polypeptide wherein the one or more amino acid residues in the oligosaccharide binding feature of the unmodified EPR3a or EPR3a-like polypeptide have been substituted with corresponding amino acid residues from the heterologous EPR3a or EPR3a-like polypeptide. Yet another embodiment of this aspect includes the heterologous EPR3a or EPR3a-like polypeptide model being a protein crystal structure, a molecular model, a cryo-EM structure, or a NMR structure. In an additional embodiment of this aspect, the endogenous LysM receptor polypeptide is an endogenous EPR3 or EPR3-like polypeptide. In another embodiment of this aspect, the modified EPR3 or EPR3-like polypeptide was generated by: (a) providing a heterologous EPR3 or EPR3-like polypeptide model including a structural model, a molecular model, a surface characteristics model, and/or an electrostatic potential model of a M1 domain, a M2 domain, a LysM3 domain, any combination thereof, or the ectodomain of the heterologous EPR3 or EPR3-like polypeptide having selectivity for the beneficial commensal microbe and an unmodified EPR3 or EPR3-like polypeptide; (b) identifying one or more amino acid residues for modification in the unmodified EPR3 or EPR3-like polypeptide by comparing amino acid residues of a oligosaccharide binding feature in the unmodified EPR3 or EPR3-like polypeptide with the corresponding amino acid residues in the heterologous EPR3 or EPR3-like polypeptide model; and (c) generating the unmodified EPR3 or EPR3-like polypeptide wherein the one or more amino acid residues in the oligosaccharide binding feature of the unmodified EPR3 or EPR3-like polypeptide have been substituted with corresponding amino acid residues from the heterologous EPR3 or EPR3-like polypeptide. Yet another embodiment of this aspect includes the heterologous EPR3 or EPR3-like polypeptide model being a protein crystal structure, a molecular model, a cryo-EM structure, or a NMR structure. A further embodiment of this aspect that can be combined with any of the preceding embodiments includes a plant or plant part produced by the method of any one of the preceding embodiments

[0027] Yet another aspect of the present disclosure relates to methods of identifying a beneficial commensal microbe capable of participating in a plant root microbiota including: a) providing a first polypeptide including an EPR3 or EPR3-like polypeptide, an ectodomain of an EPR3 or EPR3-like polypeptide, a M1 domain of an EPR3 or EPR3-like polypeptide, a M2 domain of an EPR3 or EPR3-like polypeptide, or a LysM3 domain of an EPR3 or EPR3-like polypeptide of the plant; b) contacting the first polypeptide with a sample including a microbe or an EPS, a beta-glucan, a cyclic beta-glucan, a LPS, or a surface carbohydrate produced by the microbe; and c) detecting binding of the EPS, the beta-glucan, the cyclic beta-glucan, the LPS, or the surface carbohydrate produced by the microbe to the polypeptide, wherein binding of the EPS, the beta-glucan, the cyclic beta-glucan, the LPS, or the surface carbohydrate to the polypeptide indicates that the microbe is a beneficial commensal bacteria capable of participating in the plant root microbiota; optionally, detecting enrichment of taxa in Burkholderiales and/or Rhizobiales in a plant rhizosphere or endosphere, wherein enrichment of taxa in Burkholderiales and/or Rhizobiales in the plant rhizosphere or endosphere indicates that the microbe is a beneficial commensal microbe capable of participating in a plant root microbiota; optionally, the detecting is by a functional assay optionally selected from (i) detecting enrichment of taxa in Burkholderiales and/or Rhizobiales in a plant rhizosphere or endosphere, wherein enrichment of taxa in Burkholderiales and/or Rhizobiales in the plant rhizosphere or endosphere indicates that the microbe is a beneficial commensal microbe capable of participating in a plant root microbiota; optionally, (ii) detecting nodulation in a plant root system, wherein nodulation indicates that the microbe is a beneficial commensal microbe capable of participating in a plant root microbiota; and/or (iii) detecting mycorrhization in a plant root system, wherein mycorrhization indicates that the microbe is a beneficial commensal microbe capable of participating in a plant root microbiota, or optionally the detecting is by a direct binding assay optionally selected from (1) a competition assay optionally with a known signaling saccharide, or (2) an affinity assay optionally wherein the detected affinity is compared to the affinity for the known signaling saccharide. A further embodiment of this aspect further includes providing a second polypeptide including an EPR3a or EPR3a-like polypeptide, an ectodomain of an EPR3a or EPR3a-like polypeptide, a M1 domain of an EPR3a or EPR3a-like polypeptide, a M2 domain of an EPR3a or EPR3a-like polypeptide, or a LysM3 domain of an EPR3a or EPR3a-like polypeptide of the plant of the plant in step (a), wherein the second polypeptide is in contact with the first polypeptide. An additional embodiment of this aspect further includes step (d) culturing the beneficial commensal microbe if binding is detected in step (c). Yet another embodiment of this aspect further includes step (e) applying the beneficial commensal microbe to the plant or a part thereof. A further embodiment of this aspect includes the plant part being a plant propagation material, optionally a seed, a tuber, or a plantlet, and the beneficial commensal microbe being applied to the plant propagation material, optionally to the seed as part of a seed coating, to the tuber, or to a root of the plantlet. An additional embodiment of this aspect includes the plant part being a plant vegetative or reproductive material, optionally a root, a shoot, a stem, a pollen grain, or an ovule, and the beneficial commensal microbe is applied to the plant vegetative or reproductive material of the plant, optionally as part of a coating, a solution, or a powder. Still another embodiment of this aspect further includes step (e) applying the beneficial commensal microbe, optionally in admixture with a soil-compatible carrier, a fungal carrier, or a growth medium, optionally soil, where the plant is growing or is to be grown. Yet another embodiment of this aspect, which may be combined with any of the preceding embodiments having an ectodomain of an EPR3 or EPR3-like polypeptide, includes the ectodomain of the EPR3 or EPR3-like polypeptide having at least 70% sequence identity, at least 75% sequence identity, at least 80% sequence identity, at least 85% sequence identity, at least 90% sequence identity, at least 95% sequence identity, at least 96% sequence identity, at least 97% sequence identity, at least 98% sequence identity, or at least 99% sequence identity to the ectodomain of SEQ ID NO: 1 [L. japonicus (EPR3)], SEQ ID NO: 2 [Chickpea (XP_004489790.1)], SEQ ID NO: 3 [Medicago (XP_003613165.1)], SEQ ID NO: 4 [Soybean (XP_003517716.1)], SEQ ID NO: 5 [Phaseolus (XP_007157313.1)], SEQ ID NO: 6 [Populus (XP_002322185.1)], SEQ ID NO: 7 [Malus (XP_008340354.1)], SEQ ID NO: 8 [Vitis (XP_002272814.2)], SEQ ID NO: 9 [Theobroma (XP_007036352.1)], SEQ ID NO: 10 [Ricinus (XP_002527912.1)], SEQ ID NO: 11 [Fragaria (XP_004300916.1)], SEQ ID NO: 12 [Maize (XP_008657477.1)], SEQ ID NO: 13 [Rice (XP_015628733.1)], SEQ ID NO: 14 [Wheat (CDM80098.1)], or SEQ ID NO: 15 [Barley (MLOC_5489.2)]. An additional embodiment of this aspect, which may be combined with any of the preceding embodiments having an ectodomain of an EPR3 or EPR3-like polypeptide, includes the ectodomain of the EPR3 or EPR3-like polypeptide being the ectodomain of SEQ ID NO: 1 [L. japonicus (EPR3)], SEQ ID NO: 2 [Chickpea (XP_004489790.1)], SEQ ID NO: 3 [Medicago (XP_003613165.1)], SEQ ID NO: 4 [Soybean (XP_003517716.1)], SEQ ID NO: 5 [Phaseolus (XP_007157313.1)], SEQ ID NO: 6 [Populus (XP_002322185.1)], SEQ ID NO: 7 [Malus (XP_008340354.1)], SEQ ID NO: 8 [Vitis (XP_002272814.2)], SEQ ID NO: 9 [Theobroma (XP_007036352.1)], SEQ ID NO: 10 [Ricinus (XP_002527912.1)], SEQ ID NO: 11 [Fragaria (XP_004300916.1)], SEQ ID NO: 12 [Maize (XP_008657477.1)], SEQ ID NO: 13 [Rice (XP_015628733.1)], SEQ ID NO: 14 [Wheat (CDM80098.1)], or SEQ ID NO: 15 [Barley (MLOC_5489.2)]. A further embodiment of this aspect, which may be combined with any of the preceding embodiments having an ectodomain of an EPR3a or EPR3a-like polypeptide, includes the ectodomain of the EPR3a or EPR3a-like polypeptide having at least 70% sequence identity, at least 75% sequence identity, at least 80% sequence identity, at least 85% sequence identity, at least 90% sequence identity, at least 95% sequence identity, at least 96% sequence identity, at least 97% sequence identity, at least 98% sequence identity, or at least 99% sequence identity to the ectodomain of SEQ ID NO: 62 [L. japonicus (EPR3a)], SEQ ID NO: 63, SEQ ID NO: 64, SEQ ID NO: 65, SEQ ID NO: 66, SEQ ID NO: 67, SEQ ID NO: 68, SEQ ID NO: 69, SEQ ID NO: 70, SEQ ID NO: 71, SEQ ID NO: 72, SEQ ID NO: 73, SEQ ID NO: 74, SEQ ID NO: 75, SEQ ID NO: 76, SEQ ID NO: 77, SEQ ID NO: 78, SEQ ID NO: 79, SEQ ID NO: 80, SEQ ID NO: 81, SEQ ID NO: 82, SEQ ID NO: 83, SEQ ID NO: 84, SEQ ID NO: 85, SEQ ID NO: 86, SEQ ID NO: 87, SEQ ID NO: 88, SEQ ID NO: 89, SEQ ID NO: 90, SEQ ID NO: 91, or SEQ ID NO: 92. Yet another embodiment of this aspect, which may be combined with any of the preceding embodiments having an ectodomain of an EPR3a or EPR3a-like polypeptide, includes the ectodomain of the EPR3a or EPR3a-like polypeptide being the ectodomain of SEQ ID NO: 62 [L. japonicus (EPR3a)], SEQ ID NO: 63, SEQ ID NO: 64, SEQ ID NO: 65, SEQ ID NO: 66, SEQ ID NO: 67, SEQ ID NO: 68, SEQ ID NO: 69, SEQ ID NO: 70, SEQ ID NO: 71, SEQ ID NO: 72, SEQ ID NO: 73, SEQ ID NO: 74, SEQ ID NO: 75, SEQ ID NO: 76, SEQ ID NO: 77, SEQ ID NO: 78, SEQ ID NO: 79, SEQ ID NO: 80, SEQ ID NO: 81, SEQ ID NO: 82, SEQ ID NO: 83, SEQ ID NO: 84, SEQ ID NO: 85, SEQ ID NO: 86, SEQ ID NO: 87, SEQ ID NO: 88, SEQ ID NO: 89, SEQ ID NO: 90, SEQ ID NO: 91, or SEQ ID NO: 92. Still another embodiment of this aspect includes the beneficial commensal microbe being a commensal bacteria, optionally a nitrogen-fixing bacteria, or a mycorrhizal fungi.

[0028] Still another aspect of the present disclosure relates to methods of identifying a beneficial commensal microbe capable of participating in a plant root microbiota including: a) providing a first polypeptide including an EPR3a or EPR3a-like polypeptide, an ectodomain of an EPR3a or EPR3a-like polypeptide, a M1 domain of an EPR3a or EPR3a-like polypeptide, a M2 domain of an EPR3a or EPR3a-like polypeptide, or a LysM3 domain of an EPR3a or EPR3a-like polypeptide of the plant; b) contacting the first polypeptide with a sample including a microbe or an EPS, a beta-glucan, a cyclic beta-glucan, a LPS, or a surface carbohydrate produced by the microbe; and c) detecting binding of the EPS, the beta-glucan, the cyclic beta-glucan, the LPS, or the surface carbohydrate produced by the microbe to the polypeptide, wherein binding of the EPS, the beta-glucan, the cyclic beta-glucan, the LPS, or the surface carbohydrate to the polypeptide indicates that the microbe is a beneficial commensal microbe capable of participating in a plant root microbiota; optionally, detecting enrichment of taxa in Burkholderiales and/or Rhizobiales in a plant rhizosphere or endosphere, wherein enrichment of taxa in Burkholderiales and/or Rhizobiales in the plant rhizosphere or endosphere indicates that the microbe is a beneficial commensal microbe capable of participating in a plant root microbiota; optionally, the detecting is by a functional assay optionally selected from (i) detecting enrichment of taxa in Burkholderiales and/or Rhizobiales in a plant rhizosphere or endosphere, wherein enrichment of taxa in Burkholderiales and/or Rhizobiales in the plant rhizosphere or endosphere indicates that the microbe is a beneficial commensal microbe capable of participating in a plant root microbiota; optionally, (ii) detecting nodulation in a plant root system, wherein nodulation indicates that the microbe is a beneficial commensal microbe capable of participating in a plant root microbiota; and/or (iii) detecting mycorrhization in a plant root system, wherein mycorrhization indicates that the microbe is a beneficial commensal microbe capable of participating in a plant root microbiota, or optionally the detecting is by a direct binding assay optionally selected from (1) a competition assay optionally with a known signaling saccharide, or (2) an affinity assay optionally wherein the detected affinity is compared to the affinity for the known signaling saccharide. A further embodiment of this aspect further includes providing a second polypeptide including an EPR3 or EPR3-like polypeptide, an ectodomain of an EPR3 or EPR3-like polypeptide, a M1 domain of an EPR3 or EPR3-like polypeptide, a M2 domain of an EPR3 or EPR3-like polypeptide, or a LysM3 domain of an EPR3 or EPR3-like polypeptide of the plant in step (a), wherein the second polypeptide is in contact with the first polypeptide. An additional embodiment of this aspect further includes step (d) culturing the beneficial commensal microbe if binding is detected in step (c). Yet another embodiment of this aspect further includes step (e) applying the beneficial commensal microbe to the plant or a part thereof. A further embodiment of this aspect includes the plant part being a plant propagation material, optionally a seed, a tuber, or a plantlet, and the beneficial commensal microbe being applied to the plant propagation material, optionally to the seed as part of a seed coating, to the tuber, or to a root of the plantlet. An additional embodiment of this aspect includes the plant part being a plant vegetative or reproductive material, optionally a root, a shoot, a stem, a pollen grain, or an ovule, and the beneficial commensal microbe is applied to the plant vegetative or reproductive material of the plant, optionally as part of a coating, a solution, or a powder. Still another embodiment of this aspect further includes step (e) applying the beneficial commensal microbe, optionally in admixture with a soil-compatible carrier, a fungal carrier, or a growth medium, optionally soil, where the plant is growing or is to be grown. A further embodiment of this aspect, which may be combined with any of the preceding embodiments having an ectodomain of an EPR3a or EPR3a-like polypeptide, includes the ectodomain of the EPR3a or EPR3a-like polypeptide having at least 70% sequence identity, at least 75% sequence identity, at least 80% sequence identity, at least 85% sequence identity, at least 90% sequence identity, at least 95% sequence identity, at least 96% sequence identity, at least 97% sequence identity, at least 98% sequence identity, or at least 99% sequence identity to the ectodomain of SEQ ID NO: 62 [L. japonicus (EPR3a)], SEQ ID NO: 63, SEQ ID NO: 64, SEQ ID NO: 65, SEQ ID NO: 66, SEQ ID NO: 67, SEQ ID NO: 68, SEQ ID NO: 69, SEQ ID NO: 70, SEQ ID NO: 71, SEQ ID NO: 72, SEQ ID NO: 73, SEQ ID NO: 74, SEQ ID NO: 75, SEQ ID NO: 76, SEQ ID NO: 77, SEQ ID NO: 78, SEQ ID NO: 79, SEQ ID NO: 80, SEQ ID NO: 81, SEQ ID NO: 82, SEQ ID NO: 83, SEQ ID NO: 84, SEQ ID NO: 85, SEQ ID NO: 86, SEQ ID NO: 87, SEQ ID NO: 88, SEQ ID NO: 89, SEQ ID NO: 90, SEQ ID NO: 91, or SEQ ID NO: 92. Yet another embodiment of this aspect, which may be combined with any of the preceding embodiments having an ectodomain of an EPR3a or EPR3a-like polypeptide, includes the ectodomain of the EPR3a or EPR3a-like polypeptide being the ectodomain of SEQ ID NO: 62 [L. japonicus (EPR3a)], SEQ ID NO: 63, SEQ ID NO: 64, SEQ ID NO: 65, SEQ ID NO: 66, SEQ ID NO: 67, SEQ ID NO: 68, SEQ ID NO: 69, SEQ ID NO: 70, SEQ ID NO: 71, SEQ ID NO: 72, SEQ ID NO: 73, SEQ ID NO: 74, SEQ ID NO: 75, SEQ ID NO: 76, SEQ ID NO: 77, SEQ ID NO: 78, SEQ ID NO: 79, SEQ ID NO: 80, SEQ ID NO: 81, SEQ ID NO: 82, SEQ ID NO: 83, SEQ ID NO: 84, SEQ ID NO: 85, SEQ ID NO: 86, SEQ ID NO: 87, SEQ ID NO: 88, SEQ ID NO: 89, SEQ ID NO: 90, SEQ ID NO: 91, or SEQ ID NO: 92. Still another embodiment of this aspect, which may be combined with any of the preceding embodiments having an ectodomain of an EPR3 or EPR3-like polypeptide, includes the ectodomain of the EPR3 or EPR3-like polypeptide having at least 70% sequence identity, at least 75% sequence identity, at least 80% sequence identity, at least 85% sequence identity, at least 90% sequence identity, at least 95% sequence identity, at least 96% sequence identity, at least 97% sequence identity, at least 98% sequence identity, or at least 99% sequence identity to the ectodomain of SEQ ID NO: 1 [L. japonicus (EPR3)], SEQ ID NO: 2 [Chickpea (XP_004489790.1)], SEQ ID NO: 3 [Medicago (XP_003613165.1)], SEQ ID NO: 4 [Soybean (XP_003517716.1)], SEQ ID NO: 5 [Phaseolus (XP_007157313.1)], SEQ ID NO: 6 [Populus (XP_002322185.1)], SEQ ID NO: 7 [Malus (XP_008340354.1)], SEQ ID NO: 8 [Vitis (XP_002272814.2)], SEQ ID NO: 9 [Theobroma (XP_007036352.1)], SEQ ID NO: 10 [Ricinus (XP_002527912.1)], SEQ ID NO: 11 [Fragaria (XP_004300916.1)], SEQ ID NO: 12 [Maize (XP_008657477.1)], SEQ ID NO: 13 [Rice (XP_015628733.1)], SEQ ID NO: 14 [Wheat (CDM80098.1)], or SEQ ID NO: 15 [Barley (MLOC_5489.2)]. An additional embodiment of this aspect, which may be combined with any of the preceding embodiments having an ectodomain of an EPR3 or EPR3-like polypeptide, includes the ectodomain of the EPR3 or EPR3-like polypeptide being the ectodomain of SEQ ID NO: 1 [L. japonicus (EPR3)], SEQ ID NO: 2 [Chickpea (XP_004489790.1)], SEQ ID NO: 3 [Medicago (XP_003613165.1)], SEQ ID NO: 4 [Soybean (XP_003517716.1)], SEQ ID NO: 5 [Phaseolus (XP_007157313.1)], SEQ ID NO: 6 [Populus (XP_002322185.1)], SEQ ID NO: 7 [Malus (XP_008340354.1)], SEQ ID NO: 8 [Vitis (XP_002272814.2)], SEQ ID NO: 9 [Theobroma (XP_007036352.1)], SEQ ID NO: 10 [Ricinus (XP_002527912.1)], SEQ ID NO: 11 [Fragaria (XP_004300916.1)], SEQ ID NO: 12 [Maize (XP_008657477.1)], SEQ ID NO: 13 [Rice (XP_015628733.1)], SEQ ID NO: 14 [Wheat (CDM80098.1)], or SEQ ID NO: 15 [Barley (MLOC_5489.2)]. Still another embodiment of this aspect includes the beneficial commensal microbe being a commensal bacteria, optionally a nitrogen-fixing bacteria, or a mycorrhizal fungi.

### Enumerated Embodiments

[0029] 1. A genetically altered plant or part thereof comprising a first nucleic acid sequence encoding a heterologous EPR3a or EPR3a-like polypeptide or a modified EPR3a or EPR3a-like polypeptide, wherein the heterologous EPR3a or EPR3a-like polypeptide or the modified EPR3a or EPR3a-like polypeptide provides increased selectivity for a beneficial commensal microbe as compared to a wild-type plant under the same conditions.
2. The genetically altered plant or part thereof of embodiment 1, wherein the beneficial commensal microbe is a mycorrhizal fungi.
3. The genetically altered plant or part thereof of embodiment 2, wherein the plant or part thereof further comprises a second nucleic acid sequence encoding a heterologous EPR3 or EPR3-like polypeptide or a modified EPR3 or EPR3-like polypeptide, wherein the heterologous EPR3 or EPR3-like polypeptide or the modified EPR3 or EPR3-like polypeptide provides increased selectivity for a beneficial commensal microbe as compared to a wild-type plant under the same conditions.
4. The genetically altered plant or part thereof of embodiment 3, wherein the modified EPR3a or EPR3a-like polypeptide comprises a modified ectodomain that has been replaced with all or a portion of an ectodomain of the heterologous EPR3a or EPR3a-like polypeptide, optionally all or a part of the M1 domain, the M2 domain, the LysM3 domain, or all three; and wherein the modified EPR3 or EPR3-like polypeptide comprises a modified ectodomain that has been replaced with all or a portion of an ectodomain of the heterologous EPR3 or EPR3-like polypeptide, optionally all or a part of the M1 domain, the M2 domain, the LysM3 domain, or all three.
5. The genetically altered plant or part thereof of embodiment 3, wherein the expression of the heterologous EPR3a or EPR3a-like polypeptide, the modified EPR3a or EPR3a-like polypeptide, the heterologous EPR3 or EPR3-like polypeptide, the modified EPR3 or EPR3-like polypeptide, or a combination thereof allows the plant or part thereof to recognize an EPS, a beta-glucan, a cyclic beta-glucan, a LPS, or a surface carbohydrate produced by the microbe, and wherein the microbe is a commensal bacteria, optionally a nitrogen-fixing bacteria, or a mycorrhizal fungi.
6. The genetically altered plant of embodiment 5, wherein the heterologous EPR3a or EPR3a-like polypeptide, the modified EPR3a or EPR3a-like polypeptide, the heterologous EPR3 or EPR3-like polypeptide, or the modified EPR3 or EPR3-like polypeptide is localized to a plant cell plasma membrane, or both the EPR3 or EPR3-like polypeptide and the EPR3a or EPR3a-like polypeptide are localized to a plant cell plasma membrane, and wherein the plant cell is a root cell.
7. A method of producing the genetically altered plant of embodiment 3, comprising introducing a genetic alteration to the plant comprising the first nucleic acid sequence encoding the heterologous EPR3a or EPR3a-like polypeptide, and optionally further comprising introducing a genetic alteration to the plant comprising the second nucleic acid sequence encoding the heterologous EPR3 or EPR3-like polypeptide.
8. A method of producing the genetically altered plant of embodiment 3, comprising genetically editing a gene encoding an endogenous LysM receptor polypeptide in the plant to comprise the modified ectodomain, wherein the endogenous LysM receptor polypeptide is an endogenous EPR3a or EPR3a-like polypeptide, and wherein the modified EPR3a or EPR3a-like polypeptide was generated by:
[0030] (a) providing a heterologous EPR3a or EPR3a-like polypeptide model comprising a structural model, a molecular model, a surface characteristics model, and/or an electrostatic potential model of a M1 domain, a M2 domain, a LysM3 domain, any combination thereof, or the ectodomain of the heterologous EPR3a or EPR3a-like polypeptide having selectivity for the beneficial commensal microbe and an unmodified EPR3a or EPR3a-like polypeptide;
[0031] (b) identifying one or more amino acid residues for modification in the unmodified EPRa3 polypeptide by comparing amino acid residues of a oligosaccharide binding feature in the unmodified EPR3a or EPR3a-like polypeptide with the corresponding amino acid residues in the heterologous EPR3a or EPR3a-like polypeptide model; and
[0032] (c) generating the unmodified EPR3a or EPR3a-like polypeptide wherein the one or more amino acid residues in the oligosaccharide binding feature of the unmodified EPR3a or EPR3a-like polypeptide have been substituted with corresponding amino acid residues from the heterologous EPR3a or EPR3a-like polypeptide; or
   wherein the endogenous LysM receptor polypeptide is an endogenous EPR3 or EPR3-like polypeptide, and wherein the modified EPR3 or EPR3-like polypeptide was generated by:
[0033] (a) providing a heterologous EPR3 or EPR3-like polypeptide model comprising a structural model, a molecular model, a surface characteristics model, and/or an electrostatic potential model of a M1 domain, a M2 domain, a LysM3 domain, any combination thereof, or the ectodomain of the heterologous EPR3 or EPR3-like polypeptide having selectivity for the beneficial commensal microbe and an unmodified EPR3 or EPR3-like polypeptide;
[0034] (b) identifying one or more amino acid residues for modification in the unmodified EPR3 or EPR3-like polypeptide by comparing amino acid residues of a oligosaccharide binding feature in the unmodified EPR3 or EPR3-like polypeptide with the corresponding amino acid residues in the heterologous EPR3 or EPR3-like polypeptide model; and
[0035] (c) generating the unmodified EPR3 or EPR3-like polypeptide wherein the one or more amino acid residues in the oligosaccharide binding feature of the unmodified EPR3 or EPR3-like polypeptide have been substituted with corresponding amino acid residues from the heterologous EPR3 or EPR3-like polypeptide.
   9. A genetically altered plant or part thereof comprising a first nucleic acid sequence encoding a heterologous EPR3 or EPR3-like polypeptide or a modified EPR3 or EPR3-like polypeptide, wherein the heterologous EPR3 or EPR3-like polypeptide or the modified EPR3 or EPR3-like polypeptide provides increased selectivity for a beneficial commensal microbe as compared to a wild-type plant under the same conditions.
   10. The genetically altered plant or part thereof of embodiment 9, wherein the plant or part thereof further comprises a second nucleic acid sequence encoding a heterologous EPR3a or EPR3a-like polypeptide or a modified EPR3a or EPR3a-like polypeptide, wherein the heterologous EPR3a or EPR3a-like polypeptide or the modified EPR3a or EPR3a-like polypeptide provides increased selectivity for a beneficial commensal microbe as compared to a wild-type plant under the same conditions.
   11. The genetically altered plant or part thereof of embodiment 10, wherein the modified EPR3 or EPR3-like polypeptide comprises a modified ectodomain that has been replaced with all or a portion of an ectodomain of the heterologous EPR3 or EPR3-like polypeptide, optionally all or a part of the M1 domain, the M2 domain, the LysM3 domain, or all three; and wherein the modified EPR3a or EPR3a-like polypeptide comprises a modified ectodomain that has been replaced with all or a portion of an ectodomain of the heterologous EPR3a or EPR3a-like polypeptide, optionally all or a part of the M1 domain, the M2 domain, the LysM3 domain, or all three.
   12. The genetically altered plant or part thereof of embodiment 10, wherein the expression of the heterologous EPR3 or EPR3-like polypeptide, the modified EPR3 or EPR3-like polypeptide, the heterologous EPR3a or EPR3a-like polypeptide, the modified EPR3a or EPR3a-like polypeptide, or a combination thereof allows the plant or part thereof to recognize an exopolysaccharide (EPS), a beta-glucan, a cyclic beta-glucan, a LPS, or a surface carbohydrate produced by the microbe, and wherein the microbe is a commensal bacteria, optionally a nitrogen-fixing bacteria, or a mycorrhizal fungi.
   13. The genetically altered plant or part thereof of embodiment 12, wherein the heterologous EPR3 or EPR3-like polypeptide, the modified EPR3 or EPR3-like polypeptide, the heterologous EPR3a or EPR3a-like polypeptide, or the modified EPR3a or EPR3a-like polypeptide is localized to a plant cell plasma membrane, or both the EPR3 or EPR3-like polypeptide and the EPR3a or EPR3a-like polypeptide are localized to a plant cell plasma membrane, and wherein the plant cell is a root cell.
   14. A method of producing the genetically altered plant of embodiment 10, comprising introducing a genetic alteration to the plant comprising the first nucleic acid sequence encoding the heterologous EPR3 or EPR3-like polypeptide, and optionally further comprising introducing a genetic alteration to the plant comprising the second nucleic acid sequence encoding the heterologous EPR3a or EPR3a-like polypeptide.
   15. A method of producing the genetically altered plant of embodiment 10, comprising genetically editing a gene encoding an endogenous LysM receptor polypeptide in the plant to comprise the modified ectodomain, wherein the endogenous LysM receptor polypeptide is an endogenous EPR3 or EPR3-like polypeptide, and wherein the modified EPR3 or EPR3-like polypeptide was generated by:
[0036] (a) providing a heterologous EPR3 or EPR3-like polypeptide model comprising a structural model, a molecular model, a surface characteristics model, and/or an electrostatic potential model of a M1 domain, a M2 domain, a LysM3 domain, any combination thereof, or the ectodomain of the heterologous EPR3 or EPR3-like polypeptide having selectivity for the beneficial commensal microbe and an unmodified EPR3 or EPR3-like polypeptide;
[0037] (b) identifying one or more amino acid residues for modification in the unmodified EPR3 or EPR3-like polypeptide by comparing amino acid residues of a oligosaccharide binding feature in the unmodified EPR3 or EPR3-like polypeptide with the corresponding amino acid residues in the heterologous EPR3 or EPR3-like polypeptide model; and
[0038] (c) generating the unmodified EPR3 or EPR3-like polypeptide wherein the one or more amino acid residues in the oligosaccharide binding feature of the unmodified EPR3 or EPR3-like polypeptide have been substituted with corresponding amino acid residues from the heterologous EPR3 or EPR3-like polypeptide; or
   wherein the endogenous LysM receptor polypeptide is an endogenous EPR3a or EPR3a-like polypeptide, and wherein the modified EPR3a or EPR3a-like polypeptide was generated by:
[0039] (a) providing a heterologous EPR3a or EPR3a-like polypeptide model comprising a structural model, a molecular model, a surface characteristics model, and/or an electrostatic potential model of a M1 domain, a M2 domain, a LysM3 domain, any combination thereof, or the ectodomain of the heterologous EPR3a or EPR3a-like polypeptide having selectivity for the beneficial commensal microbe and an unmodified EPR3a or EPR3a-like polypeptide;
[0040] (b) identifying one or more amino acid residues for modification in the unmodified EPR3a or EPR3a-like polypeptide by comparing amino acid residues of a oligosaccharide binding feature in the unmodified EPR3a or EPR3a-like polypeptide with the corresponding amino acid residues in the heterologous EPR3a or EPR3a-like polypeptide model; and
[0041] (c) generating the unmodified EPR3a or EPR3a-like polypeptide wherein the one or more amino acid residues in the oligosaccharide binding feature of the unmodified EPR3a or EPR3a-like polypeptide have been substituted with corresponding amino acid residues from the heterologous EPR3a or EPR3a-like polypeptide.
   16. A method of identifying a beneficial commensal microbe capable of participating in a plant root microbiota comprising:
[0042] a) providing a first polypeptide comprising an EPR3a or EPR3a-like polypeptide, an ectodomain of an EPR3a or EPR3a-like polypeptide, a M1 domain of an EPR3a or EPR3a-like polypeptide, a M2 domain of an EPR3a or EPR3a-like polypeptide, or a LysM3 domain of an EPR3a or EPR3a-like polypeptide of the plant;
[0043] b) contacting the first polypeptide with a sample comprising a microbe or an EPS, a beta-glucan, a cyclic beta-glucan, a LPS, or a surface carbohydrate produced by the microbe;
[0044] c) detecting binding of the EPS, the beta-glucan, the cyclic beta-glucan, the LPS, or the surface carbohydrate produced by the microbe to the polypeptide, wherein binding of the EPS, the beta-glucan, the cyclic beta-glucan, the LPS, or the surface carbohydrate to the polypeptide indicates that the microbe is a beneficial commensal microbe capable of participating in the plant root microbiota; optionally, the detecting is by a functional assay optionally selected from (i) detecting enrichment of taxa in Burkholderiales and/or Rhizobiales in a plant rhizosphere or endosphere, wherein enrichment of taxa in Burkholderiales and/or Rhizobiales in the plant rhizosphere or endosphere indicates that the microbe is a beneficial commensal microbe capable of participating in a plant root microbiota; optionally, (ii) detecting nodulation in a plant root system, wherein nodulation indicates that the microbe is a beneficial commensal microbe capable of participating in a plant root microbiota; and/or (iii) detecting mycorrhization in a plant root system, wherein mycorrhization indicates that the microbe is a beneficial commensal microbe capable of participating in a plant root microbiota, or optionally the detecting is by a direct binding assay optionally selected from (1) a competition assay optionally with a known signaling saccharide, or (2) an affinity assay optionally wherein the detected affinity is compared to the affinity for the known signaling saccharide; and
   optionally further comprising:
[0045] d) culturing the beneficial commensal microbe if binding is detected in step (c); and
[0046] e) applying the beneficial commensal microbe to the plant or a part thereof or applying the beneficial commensal microbe, optionally in admixture with a soil-compatible carrier, a fungal carrier, or a growth medium, optionally soil, where the plant is growing or is to be grown.
   17. The method of embodiment 16, further comprising providing a second polypeptide comprising an EPR3 or EPR3-like polypeptide, an ectodomain of an EPR3 or EPR3-like polypeptide, a M1 domain of an EPR3 or EPR3-like polypeptide, a M2 domain of an EPR3 or EPR3-like polypeptide, or a LysM3 domain of an EPR3 or EPR3-like polypeptide of the plant in step (a), wherein the second polypeptide is in contact with the first polypeptide.
   18. A method of identifying a beneficial commensal microbe capable of participating in a plant root microbiota comprising:
[0047] a) providing a first polypeptide comprising an EPR3 or EPR3-like polypeptide, an ectodomain of an EPR3 or EPR3-like polypeptide, a M1 domain of an EPR3 or EPR3-like polypeptide, a M2 domain of an EPR3 or EPR3-like polypeptide, or a LysM3 domain of an EPR3 or EPR3-like polypeptide of the plant;
[0048] b) contacting the first polypeptide with a sample comprising a microbe or an EPS, a beta-glucan, a cyclic beta-glucan, a LPS, or a surface carbohydrate produced by the microbe;
[0049] c) detecting binding of the EPS, the beta-glucan, the cyclic beta-glucan, the LPS, or the surface carbohydrate produced by the microbe to the polypeptide, wherein binding of the EPS, the beta-glucan, the cyclic beta-glucan, the LPS, or the surface carbohydrate to the polypeptide indicates that the microbe is a beneficial commensal microbe capable of participating in a plant root microbiota; optionally, the detecting is by a functional assay optionally selected from (i) detecting enrichment of taxa in Burkholderiales and/or Rhizobiales in a plant rhizosphere or endosphere, wherein enrichment of taxa in Burkholderiales and/or Rhizobiales in the plant rhizosphere or endosphere indicates that the microbe is a beneficial commensal microbe capable of participating in a plant root microbiota; optionally, (ii) detecting nodulation in a plant root system, wherein nodulation indicates that the microbe is a beneficial commensal microbe capable of participating in a plant root microbiota; and/or (iii) detecting mycorrhization in a plant root system, wherein mycorrhization indicates that the microbe is a beneficial commensal microbe capable of participating in a plant root microbiota, or optionally the detecting is by a direct binding assay optionally selected from (1) a competition assay optionally with a known signaling saccharide, or (2) an affinity assay optionally wherein the detected affinity is compared to the affinity for the known signaling saccharide; and
   optionally further comprising:

[0050] d) culturing the beneficial commensal microbe if binding is detected in step (c); and

[0051] e) applying the beneficial commensal microbe to the plant or a part thereof or applying the beneficial commensal microbe, optionally in admixture with a soil-compatible carrier, a fungal carrier, or a growth medium, optionally soil, where the plant is growing or is to be grown.

19. The method of embodiment 18, further comprising providing a second polypeptide comprising an EPR3a or EPR3a-like polypeptide, an ectodomain of an EPR3a or EPR3a-like polypeptide, a M1 domain of an EPR3a or EPR3a-like polypeptide, a M2 domain of an EPR3a or EPR3a-like polypeptide, or a LysM3 domain of an EPR3a or EPR3a-like polypeptide of the plant in step (a), wherein the second polypeptide is in contact with the first polypeptide.
20. A genetically altered plant or part thereof comprising a first nucleic acid sequence encoding a heterologous EPR3 or EPR3-like polypeptide or a modified EPR3 or EPR3-like polypeptide, wherein the heterologous EPR3 or EPR3-like polypeptide or the modified EPR3 or EPR3-like polypeptide provides increased selectivity for a beneficial commensal microbe as compared to a wild-type plant under the same conditions.
21. The genetically altered plant or part thereof of embodiment 20, wherein the plant or part thereof further comprises a second nucleic acid sequence encoding a heterologous EPR3a or EPR3a-like polypeptide or a modified EPR3a or EPR3a-like polypeptide.
22. The genetically altered plant or part thereof of embodiment 20 or embodiment 21, wherein the heterologous EPR3 or EPR3-like polypeptide is selected from the group consisting of a first polypeptide with at least 70% sequence identity, at least 75% sequence identity, at least 80% sequence identity, at least 85% sequence identity, at least 90% sequence identity, at least 95% sequence identity, at least 96% sequence identity, at least 97% sequence identity, at least 98% sequence identity, or at least 99% sequence identity to SEQ ID NO: 1 [L. japonicus (BAI79269.1)], a second polypeptide with at least 70% sequence identity, at least 75% sequence identity, at least 80% sequence identity, at least 85% sequence identity, at least 90% sequence identity, at least 95% sequence identity, at least 96% sequence identity, at least 97% sequence identity, at least 98% sequence identity, or at least 99% sequence identity to SEQ ID NO: 2 [Chickpea (XP_004489790.1)], a third polypeptide with at least 70% sequence identity, at least 75% sequence identity, at least 80% sequence identity, at least 85% sequence identity, at least 90% sequence identity, at least 95% sequence identity, at least 96% sequence identity, at least 97% sequence identity, at least 98% sequence identity, or at least 99% sequence identity to SEQ ID NO: 3 [Medicago (XP_003613165.1)], a fourth polypeptide with at least 70% sequence identity, at least 75% sequence identity, at least 80% sequence identity, at least 85% sequence identity, at least 90% sequence identity, at least 95% sequence identity, at least 96% sequence identity, at least 97% sequence identity, at least 98% sequence identity, or at least 99% sequence identity to SEQ ID NO: 4 [Soybean (XP_003517716.1)], a fifth polypeptide with at least 70% sequence identity, at least 75% sequence identity, at least 80% sequence identity, at least 85% sequence identity, at least 90% sequence identity, at least 95% sequence identity, at least 96% sequence identity, at least 97% sequence identity, at least 98% sequence identity, or at least 99% sequence identity to SEQ ID NO: 5 [Phaseolus (XP_007157313.1)], a sixth polypeptide with at least 70% sequence identity, at least 75% sequence identity, at least 80% sequence identity, at least 85% sequence identity, at least 90% sequence identity, at least 95% sequence identity, at least 96% sequence identity, at least 97% sequence identity, at least 98% sequence identity, or at least 99% sequence identity to SEQ ID NO: 6 [Populus (XP_002322185.1)], a seventh polypeptide with at least 70% sequence identity, at least 75% sequence identity, at least 80% sequence identity, at least 85% sequence identity, at least 90% sequence identity, at least 95% sequence identity, at least 96% sequence identity, at least 97% sequence identity, at least 98% sequence identity, or at least 99% sequence identity to SEQ ID NO: 7 [Malus (XP_008340354.1)], an eighth polypeptide with at least 70% sequence identity, at least 75% sequence identity, at least 80% sequence identity, at least 85% sequence identity, at least 90% sequence identity, at least 95% sequence identity, at least 96% sequence identity, at least 97% sequence identity, at least 98% sequence identity, or at least 99% sequence identity to SEQ ID NO: 8 [Vitis (XP_002272814.2)], a ninth polypeptide with at least 70% sequence identity, at least 75% sequence identity, at least 80% sequence identity, at least 85% sequence identity, at least 90% sequence identity, at least 95% sequence identity, at least 96% sequence identity, at least 97% sequence identity, at least 98% sequence identity, or at least 99% sequence identity to SEQ ID NO: 9 [Theobroma (XP_007036352.1)], a tenth polypeptide with at least 70% sequence identity, at least 75% sequence identity, at least 80% sequence identity, at least 85% sequence identity, at least 90% sequence identity, at least 95% sequence identity, at least 96% sequence identity, at least 97% sequence identity, at least 98% sequence identity, or at least 99% sequence identity to SEQ ID NO: 10 [Ricinus (XP_002527912.1)], an eleventh polypeptide with at least 70% sequence identity, at least 75% sequence identity, at least 80% sequence identity, at least 85% sequence identity, at least 90% sequence identity, at least 95% sequence identity, at least 96% sequence identity, at least 97% sequence identity, at least 98% sequence identity, or at least 99% sequence identity to SEQ ID NO: 11 [Fragaria (XP_004300916.1)], a twelfth polypeptide with at least 70% sequence identity, at least 75% sequence identity, at least 80% sequence identity, at least 85% sequence identity, at least 90% sequence identity, at least 95% sequence identity, at least 96% sequence identity, at least 97% sequence identity, at least 98% sequence identity, or at least 99% sequence identity to SEQ ID NO: 12 [Maize (XP_008657477.1)], a thirteenth polypeptide with at least 70% sequence identity, at least 75% sequence identity, at least 80% sequence identity, at least 85% sequence identity, at least 90% sequence identity, at least 95% sequence identity, at least 96% sequence identity, at least 97% sequence identity, at least 98% sequence identity, or at least 99% sequence identity to SEQ ID NO: 13 [Rice (XP_015628733.1)], a fourteenth polypeptide with at least 70% sequence identity, at least 75% sequence identity, at least 80% sequence identity, at least 85% sequence identity, at least 90% sequence identity, at least 95% sequence identity, at least 96% sequence identity, at least 97% sequence identity, at least 98% sequence identity, or at least 99% sequence identity to SEQ ID NO: 14 [Wheat (CDM80098.1)], and a fifteenth polypeptide with at least 70% sequence identity, at least 75% sequence identity, at least 80% sequence identity, at least 85% sequence identity, at least 90% sequence identity, at least 95% sequence identity, at least 96% sequence identity, at least 97% sequence identity, at least 98% sequence identity, or at least 99% sequence identity to SEQ ID NO: 15 [Barley (MLOC 5489.2)].
23. The genetically altered plant or part thereof of embodiment 22, wherein the heterologous EPR3 or EPR3-like polypeptide is selected from the group consisting of SEQ ID NO: 1 [L. japonicus (EPR3)], SEQ ID NO: 2 [Chickpea (XP_004489790.1)], SEQ ID NO: 3 [Medicago (XP_003613165.1)], SEQ ID NO: 4 [Soybean (XP_003517716.1)], SEQ ID NO: 5 [Phaseolus (XP_007157313.1)], SEQ ID NO: 6 [Populus (XP_002322185.1)], SEQ ID NO: 7 [Malus (XP_008340354.1)], SEQ ID NO: 8 [Vitis (XP_002272814.2)], SEQ ID NO: 9 [Theobroma (XP_007036352.1)], SEQ ID NO: 10 [Ricinus (XP_002527912.1)], SEQ ID NO: 11 [Fragaria (XP_004300916.1)], SEQ ID NO: 12 [Maize (XP_008657477.1)], SEQ ID NO: 13 [Rice (XP_015628733.1)], SEQ ID NO: 14 [Wheat (CDM80098.1)], and SEQ ID NO: 15 [Barley (MLOC_5489.2)].
24. The genetically altered plant or part thereof of any one of embodiments 21-23, wherein the heterologous EPR3a or EPR3a-like polypeptide is selected from the group consisting of a polypeptide with at least 70% sequence identity, at least 75% sequence identity, at least 80% sequence identity, at least 85% sequence identity, at least 90% sequence identity, at least 95% sequence identity, at least 96% sequence identity, at least 97% sequence identity, at least 98% sequence identity, or at least 99% sequence identity to SEQ ID NO: 62 [L. japonicus (EPR3a)], SEQ ID NO: 63, SEQ ID NO: 64, SEQ ID NO: 65, SEQ ID NO: 66, SEQ ID NO: 67, SEQ ID NO: 68, SEQ ID NO: 69, SEQ ID NO: 70, SEQ ID NO: 71, SEQ ID NO: 72, SEQ ID NO: 73, SEQ ID NO: 74, SEQ ID NO: 75, SEQ ID NO: 76, SEQ ID NO: 77, SEQ ID NO: 78, SEQ ID NO: 79, SEQ ID NO: 80, SEQ ID NO: 81, SEQ ID NO: 82, SEQ ID NO: 83, SEQ ID NO: 84, SEQ ID NO: 85, SEQ ID NO: 86, SEQ ID NO: 87, SEQ ID NO: 88, SEQ ID NO: 89, SEQ ID NO: 90, SEQ ID NO: 91, or SEQ ID NO: 92.
25. The genetically altered plant or part thereof of embodiment 24, wherein the heterologous EPR3a or EPR3a-like polypeptide is SEQ ID NO: 62 [L. japonicus (EPR3a)], SEQ ID NO: 63, SEQ ID NO: 64, SEQ ID NO: 65, SEQ ID NO: 66, SEQ ID NO: 67, SEQ ID NO: 68, SEQ ID NO: 69, SEQ ID NO: 70, SEQ ID NO: 71, SEQ ID NO: 72, SEQ ID NO: 73, SEQ ID NO: 74, SEQ ID NO: 75, SEQ ID NO: 76, SEQ ID NO: 77, SEQ ID NO: 78, SEQ ID NO: 79, SEQ ID NO: 80, SEQ ID NO: 81, SEQ ID NO: 82, SEQ ID NO: 83, SEQ ID NO: 84, SEQ ID NO: 85, SEQ ID NO: 86, SEQ ID NO: 87, SEQ ID NO: 88, SEQ ID NO: 89, SEQ ID NO: 90, SEQ ID NO: 91, or SEQ ID NO: 92.
26. The genetically altered plant or part thereof of any one of embodiments 20-25, wherein the modified EPR3 or EPR3-like polypeptide comprises a modified ectodomain that has been replaced with all or a portion of an ectodomain of the heterologous EPR3 or EPR3-like polypeptide, optionally all or a part of the M1 domain, the M2 domain, the LysM3 domain, or all three.
27. The genetically altered plant or part thereof of embodiment 26, wherein the portion replaced is at least 10%, at least 20%, at least 30%, at least 40%, at least 50%, at least 60%, at least 70%, at least 80%, at least 90%, less than 10%, less than 20%, less than 30%, less than 40%, less than 50%, less than 60%, less than 70%, less than 80%, or less than 90%, of the ectodomain or, optionally all or a part of the M1 domain, the M2 domain, the LysM3 domain, or all three.
28. The genetically altered plant or part thereof of any one of embodiments 21-25, wherein the modified EPR3a or EPR3a-like polypeptide comprises a modified ectodomain that has been replaced with all or a portion of an ectodomain of the heterologous EPR3a or EPR3a-like polypeptide, optionally all or a part of the M1 domain, the M2 domain, the LysM3 domain, or all three.
29. The genetically altered plant or part thereof of embodiment 28, wherein the portion replaced is at least 10%, at least 20%, at least 30%, at least 40%, at least 50%, at least 60%, at least 70%, at least 80%, at least 90%, less than 10%, less than 20%, less than 30%, less than 40%, less than 50%, less than 60%, less than 70%, less than 80%, or less than 90%, of the ectodomain or, optionally all or a part of the M1 domain, the M2 domain, the LysM3 domain, or all three.
30. The genetically altered plant or part thereof of any one of embodiments 21-29, wherein the heterologous EPR3 or EPR3-like polypeptide and the heterologous EPR3a or EPR3a-like polypeptide are from the same plant species or the same plant variety.
31. The genetically altered plant or part thereof of any one of embodiments 20-30, wherein the expression of the heterologous EPR3 or EPR3-like polypeptide or the modified EPR3 or EPR3-like polypeptide allows the plant or part thereof to recognize an exopolysaccharide (EPS), a beta-glucan, a cyclic beta-glucan, a LPS, or a surface carbohydrate produced by the microbe.
32. The genetically altered plant or part thereof of any one of embodiments 21-31, wherein the expression of the heterologous EPR3a or EPR3a-like polypeptide or the modified EPR3a or EPR3a-like polypeptide allows the plant or part thereof to recognize an EPS, a beta-glucan, a cyclic beta-glucan, a LPS, or a surface carbohydrate produced by the microbe.
33. The genetically altered plant or part thereof of embodiment 32, wherein the expression of the heterologous EPR3 or EPR3-like polypeptide or the modified EPR3 or EPR3-like polypeptide and the expression of the heterologous EPR3a or EPR3a-like polypeptide or the modified EPR3a or EPR3a-like polypeptide allows the plant or part thereof to recognize an EPS, a beta-glucan, a cyclic beta-glucan, a LPS, or a surface carbohydrate produced by the microbe.
34. The genetically altered plant or part thereof of any one of embodiments 31-33, wherein the microbe is a commensal bacteria, optionally a nitrogen-fixing bacteria, or a mycorrhizal fungi.
35. The genetically altered plant or part thereof of embodiment 34, wherein the nitrogen-fixing bacteria is selected from the group consisting of Mesorhizobium loti, Mesorhizobium huakuii, Mesorhizobium mediterraneum, Mesorhizobium ciceri, Mesorhizobium spp., Rhizobium mongolense, Rhizobium tropici, Rhizobium etli phaseoli, Rhizobium giardinii, Rhizobium leguminosarum optionally R. leguminosarum trifolii, R. leguminosarum viciae, and R. leguminosarum phaseoli, Burkholderiales optionally symbionts of Mimosa, Sinorhizobium meliloti, Sinorhizobium medicae, Sinorhizobium fredii, Sinorhizobium fredii NGR234, Azorhizobium caulinodans, Bradyrhizobium japonicum, Bradyrhizobium elkanii, Bradyrhizobium liaonginense, Rhizobium spp., Mesorhizobium spp., Sinorhizobium spp., Azorhizobium spp. Frankia spp., and any combination thereof, or the mycorrhizal fungi is selected from the group consisting of Acaulosporaceae spp., Diversisporaceae spp., Gigasporaceae spp., Pacisporaceae spp., Funneliformis spp., Glomus spp., Rhizophagus spp., Sclerocystis spp., Septoglomus spp., Claroideoglomus spp., Ambispora spp., Archaeospora spp., Geosiphon pyriformis, Paraglomus spp., other species in the division Glomeromycota, and any combination thereof.
36. The genetically altered plant or part thereof of any one of embodiments 20-35, wherein the heterologous EPR3 or EPR3-like polypeptide or the modified EPR3 or EPR3-like polypeptide is localized to a plant cell plasma membrane.
37. The genetically altered plant or part thereof of any one of embodiments 21-36, wherein the heterologous EPR3a or EPR3a-like polypeptide or the modified EPR3a or EPR3a-like polypeptide is localized to a plant cell plasma membrane.
38. The genetically altered plant or part thereof of embodiment 36 or embodiment 37, wherein the plant cell is a root cell.
39. The genetically altered plant or part thereof of embodiment 38, wherein the root cell is a root epidermal cell or a root cortex cell.
40. The genetically altered plant or part thereof of any one of embodiments 20-39, wherein the heterologous EPR3 or EPR3-like polypeptide or the modified EPR3 or EPR3-like polypeptide is expressed in a developing plant root system.
41. The genetically altered plant or part thereof of any one of embodiments 21-40, wherein the heterologous EPR3a or EPR3a-like polypeptide or the modified EPR3a or EPR3a-like polypeptide is expressed in a developing plant root system.
42. The genetically altered plant or part thereof of any one of embodiments 20-41, wherein the first nucleic acid sequence is operably linked to a first promoter.
43. The genetically altered plant or part thereof of embodiment 42, wherein the first promoter is a root specific promoter, and wherein the root specific promoter is optionally selected from the group consisting of a NFR1 or NFR5/NFP promoter, an EPR3 or an EPR3a promoter, a Lotus NFR5 promoter, a Lotus NFR1 promoter, a maize allothioneine promoter, a chitinase promoter, a maize ZRP2 promoter, a tomato LeExt1 promoter, a glutamine synthetase soybean root promoter, a RCC3 promoter, a rice antiquitine promoter, a LRR receptor kinase promoter, and an Arabidopsis pCO2 promoter.
44. The genetically altered plant or part thereof of embodiment 42, wherein the first promoter is a constitutive promoter, and wherein the constitutive promoter is optionally selected from the group consisting of a CaMV35S promoter, a derivative of the CaMV35S promoter, a maize ubiquitin promoter, a trefoil promoter, a vein mosaic cassava virus promoter, and an Arabidopsis UBQ10 promoter.
45. The genetically altered plant or part thereof of any one of embodiments 21-44, wherein the second nucleic acid sequence is operably linked to a second promoter.
46. The genetically altered plant or part thereof of embodiment 45, wherein the second promoter is a root specific promoter, and wherein the root specific promoter is optionally selected from the group consisting of a NFR1 or NFR5/NFP promoter, an EPR3 or an EPR3a promoter, a Lotus NFR5 promoter, a Lotus NFR1 promoter, a maize allothioneine promoter, a chitinase promoter, a maize ZRP2 promoter, a tomato LeExt1 promoter, a glutamine synthetase soybean root promoter, a RCC3 promoter, a rice antiquitine promoter, a LRR receptor kinase promoter, and an Arabidopsis pCO2 promoter.
47. The genetically altered plant or part thereof of embodiment 45, wherein the second promoter is a constitutive promoter, and wherein the constitutive promoter is optionally selected from the group consisting of a CaMV35S promoter, a derivative of the CaMV35S promoter, a maize ubiquitin promoter, a trefoil promoter, a vein mosaic cassava virus promoter, and an Arabidopsis UBQ10 promoter.
48. The genetically altered plant or part thereof of any one of embodiments 20-47, wherein the plant is selected from the group consisting of cassava, corn, cowpea, rice, barley, wheat, Trema spp., apple, pear, plum, apricot, peach, almond, walnut, strawberry, raspberry, blackberry, red currant, black currant, melon, cucumber, pumpkin, squash, grape, tomato, pepper, and hemp.
49. The genetically altered plant part of any one of embodiments 20-48, wherein the plant part is a leaf, a stem, a root, a root primordia, a flower, a seed, a fruit, a kernel, a grain, a cell, or a portion thereof.
50. The genetically altered plant part of embodiment 49, wherein the plant part is a fruit, a kernel, or a grain.
51. A pollen grain or an ovule of the genetically altered plant of any one of embodiments 20-48.
52. A protoplast produced from the plant of any one of embodiments 20-48.
53. A tissue culture produced from protoplasts or cells from the plant of any one of embodiments 20-48, wherein the cells or protoplasts are produced from a plant part selected from the group consisting of leaf, anther, pistil, stem, petiole, root, root primordia, root tip, fruit, seed, flower, cotyledon, hypocotyl, embryo, and meristematic cell.

[0052] 54. A method of producing the genetically altered plant of any one of embodiments 20-48, comprising introducing a genetic alteration to the plant comprising the first nucleic acid sequence encoding the heterologous EPR3 or EPR3-like polypeptide.

55. The method of embodiment 54, wherein the first nucleic acid sequence is operably linked to a first promoter.
56. The method of embodiment 55, wherein the first promoter is a root specific promoter, and wherein the root specific promoter is optionally selected from the group consisting of a NFR1 or NFR5/NFP promoter, an EPR3 or an EPR3a promoter, a Lotus NFR5 promoter, a Lotus NFR1 promoter, a maize allothioneine promoter, a chitinase promoter, a maize ZRP2 promoter, a tomato LeExt1 promoter, a glutamine synthetase soybean root promoter, a RCC3 promoter, a rice antiquitine promoter, a LRR receptor kinase promoter, and an Arabidopsis pCO2 promoter.
57. The method of embodiment 55, wherein the first promoter is a constitutive promoter, and wherein the constitutive promoter is optionally selected from the group consisting of a CaMV35S promoter, a derivative of the CaMV35S promoter, a maize ubiquitin promoter, a trefoil promoter, a vein mosaic cassava virus promoter, and an Arabidopsis UBQ10 promoter.
58. The method of any one of embodiments 54-57, further comprising introducing a genetic alteration to the plant comprising the second nucleic acid sequence encoding the heterologous EPR3a or EPR3a-like polypeptide.
59. The method of embodiment 58, wherein the second nucleic acid sequence is operably linked to a second promoter.
60. The method of embodiment 59, wherein the second promoter is a root specific promoter, and wherein the root specific promoter is optionally selected from the group consisting of a NFR1 or NFR5/NFP promoter, an EPR3 or an EPR3a promoter, a Lotus NFR5 promoter, a Lotus NFR1 promoter, a maize allothioneine promoter, a chitinase promoter, a maize ZRP2 promoter, a tomato LeExt1 promoter, a glutamine synthetase soybean root promoter, a RCC3 promoter, a rice antiquitine promoter, a LRR receptor kinase promoter, and an Arabidopsis pCO2 promoter.
61. The method of embodiment 59, wherein the second promoter is a constitutive promoter, and wherein the constitutive promoter is optionally selected from the group consisting of a CaMV35S promoter, a derivative of the CaMV35S promoter, a maize ubiquitin promoter, a trefoil promoter, a vein mosaic cassava virus promoter, and an Arabidopsis UBQ10 promoter.
62. The method of any one of embodiments 54-61, wherein the first nucleic acid sequence is inserted into the genome of the plant so that the nucleic acid sequence is operably linked to a first endogenous promoter.
63. The method of embodiment 62, wherein the first endogenous promoter is a root specific promoter.
64. The method of any one of embodiments 58-63, wherein the second nucleic acid sequence is inserted into the genome of the plant so that the nucleic acid sequence is operably linked to a second endogenous promoter.
65. The method of embodiment 64, wherein the second endogenous promoter is a root specific promoter.
66. A method of producing the genetically altered plant of any one of embodiments 26-65, comprising genetically editing a gene encoding an endogenous LysM receptor polypeptide in the plant to comprise the modified ectodomain.
67. The method of embodiment 66, wherein the endogenous LysM receptor polypeptide is an endogenous EPR3 or EPR3-like polypeptide.
68. The method of embodiment 66 or embodiment 67, wherein the modified EPR3 or EPR3-like polypeptide was generated by:
[0053] (a) providing a heterologous EPR3 or EPR3-like polypeptide model comprising a structural model, a molecular model, a surface characteristics model, and/or an electrostatic potential model of a M1 domain, a M2 domain, a LysM3 domain, any combination thereof, or the ectodomain of the heterologous EPR3 or EPR3-like polypeptide having selectivity for the beneficial commensal microbe and an unmodified EPR3 or EPR3-like polypeptide;
[0054] (b) identifying one or more amino acid residues for modification in the unmodified EPR3 or EPR3-like polypeptide by comparing amino acid residues of a oligosaccharide binding feature in the unmodified EPR3 or EPR3-like polypeptide with the corresponding amino acid residues in the heterologous EPR3 or EPR3-like polypeptide model; and
[0055] (c) generating the unmodified EPR3 or EPR3-like polypeptide wherein the one or more amino acid residues in the oligosaccharide binding feature of the unmodified EPR3 or EPR3-like polypeptide have been substituted with corresponding amino acid residues from the heterologous EPR3 or EPR3-like polypeptide.
   69. The method of embodiment 68, wherein the heterologous EPR3 or EPR3-like polypeptide model is a protein crystal structure, a molecular model, a cryo-EM structure, or a NMR structure.
   70. The method of embodiment 66, wherein the endogenous LysM receptor polypeptide is an endogenous EPR3a or EPR3a-like polypeptide.
   71. The method of embodiment 70, wherein the modified EPR3a or EPR3a-like polypeptide was generated by:
[0056] (a) providing a heterologous EPR3a or EPR3a-like polypeptide model comprising a structural model, a molecular model, a surface characteristics model, and/or an electrostatic potential model of a M1 domain, a M2 domain, a LysM3 domain, any combination thereof, or the ectodomain of the heterologous EPR3a or EPR3a-like polypeptide having selectivity for the beneficial commensal microbe and an unmodified EPR3a or EPR3a-like polypeptide;
[0057] (b) identifying one or more amino acid residues for modification in the unmodified EPR3a or EPR3a-like polypeptide by comparing amino acid residues of a oligosaccharide binding feature in the unmodified EPR3a or EPR3a-like polypeptide with the corresponding amino acid residues in the heterologous EPR3a or EPR3a-like polypeptide model; and
[0058] (c) generating the unmodified EPR3a or EPR3a-like polypeptide wherein the one or more amino acid residues in the oligosaccharide binding feature of the unmodified EPR3a or EPR3a-like polypeptide have been substituted with corresponding amino acid residues from the heterologous EPR3a or EPR3a-like polypeptide.
   72. The method of embodiment 71, wherein the heterologous EPR3a or EPR3a-like polypeptide model is a protein crystal structure, a molecular model, a cryo-EM structure, or a NMR structure.
   73. A plant or part thereof produced by the method of any one of embodiments 54-72.
   74. A genetically altered plant or part thereof comprising a first nucleic acid sequence encoding a heterologous EPR3a or EPR3a-like polypeptide or a modified EPR3a or EPR3a-like polypeptide, wherein the heterologous EPR3a or EPR3a-like polypeptide or the modified EPR3a or EPR3a-like polypeptide provides increased selectivity for a beneficial commensal microbe as compared to a wild-type plant under the same conditions.
   75. The genetically altered plant or part thereof of embodiment 74, wherein the plant or part thereof further comprises a second nucleic acid sequence encoding a heterologous EPR3 or EPR3-like polypeptide or a modified EPR3 or EPR3-like polypeptide.
   76. The genetically altered plant or part thereof of embodiment 74 or embodiment 75, wherein the heterologous EPR3a or EPR3a-like polypeptide is selected from the group consisting of a polypeptide with at least 70% sequence identity, at least 75% sequence identity, at least 80% sequence identity, at least 85% sequence identity, at least 90% sequence identity, at least 95% sequence identity, at least 96% sequence identity, at least 97% sequence identity, at least 98% sequence identity, or at least 99% sequence identity to SEQ ID NO: 62 [L. japonicus (EPR3a)], SEQ ID NO: 63, SEQ ID NO: 64, SEQ ID NO: 65, SEQ ID NO: 66, SEQ ID NO: 67, SEQ ID NO: 68, SEQ ID NO: 69, SEQ ID NO: 70, SEQ ID NO: 71, SEQ ID NO: 72, SEQ ID NO: 73, SEQ ID NO: 74, SEQ ID NO: 75, SEQ ID NO: 76, SEQ ID NO: 77, SEQ ID NO: 78, SEQ ID NO: 79, SEQ ID NO: 80, SEQ ID NO: 81, SEQ ID NO: 82, SEQ ID NO: 83, SEQ ID NO: 84, SEQ ID NO: 85, SEQ ID NO: 86, SEQ ID NO: 87, SEQ ID NO: 88, SEQ ID NO: 89, SEQ ID NO: 90, SEQ ID NO: 91, or SEQ ID NO: 92.
   77. The genetically altered plant or part thereof of embodiment 76, wherein the heterologous EPR3a or EPR3a-like polypeptide is the heterologous EPR3a or EPR3a-like polypeptide is SEQ ID NO: 62 [L. japonicus (EPR3a)], SEQ ID NO: 63, SEQ ID NO: 64, SEQ ID NO: 65, SEQ ID NO: 66, SEQ ID NO: 67, SEQ ID NO: 68, SEQ ID NO: 69, SEQ ID NO: 70, SEQ ID NO: 71, SEQ ID NO: 72, SEQ ID NO: 73, SEQ ID NO: 74, SEQ ID NO: 75, SEQ ID NO: 76, SEQ ID NO: 77, SEQ ID NO: 78, SEQ ID NO: 79, SEQ ID NO: 80, SEQ ID NO: 81, SEQ ID NO: 82, SEQ ID NO: 83, SEQ ID NO: 84, SEQ ID NO: 85, SEQ ID NO: 86, SEQ ID NO: 87, SEQ ID NO: 88, SEQ ID NO: 89, SEQ ID NO: 90, SEQ ID NO: 91, or SEQ ID NO: 92.
   78. The genetically altered plant or part thereof of any one of embodiments 75-77, wherein the heterologous EPR3 or EPR3-like polypeptide is selected from the group consisting of a first polypeptide with at least 70% sequence identity, at least 75% sequence identity, at least 80% sequence identity, at least 85% sequence identity, at least 90% sequence identity, at least 95% sequence identity, at least 96% sequence identity, at least 97% sequence identity, at least 98% sequence identity, or at least 99% sequence identity to SEQ ID NO: 1 [L. japonicus (BAI79269.1)], a second polypeptide with at least 70% sequence identity, at least 75% sequence identity, at least 80% sequence identity, at least 85% sequence identity, at least 90% sequence identity, at least 95% sequence identity, at least 96% sequence identity, at least 97% sequence identity, at least 98% sequence identity, or at least 99% sequence identity to SEQ ID NO: 2 [Chickpea (XP_004489790.1)], a third polypeptide with at least 70% sequence identity, at least 75% sequence identity, at least 80% sequence identity, at least 85% sequence identity, at least 90% sequence identity, at least 95% sequence identity, at least 96% sequence identity, at least 97% sequence identity, at least 98% sequence identity, or at least 99% sequence identity to SEQ ID NO: 3 [Medicago (XP_003613165.1)], a fourth polypeptide with at least 70% sequence identity, at least 75% sequence identity, at least 80% sequence identity, at least 85% sequence identity, at least 90% sequence identity, at least 95% sequence identity, at least 96% sequence identity, at least 97% sequence identity, at least 98% sequence identity, or at least 99% sequence identity to SEQ ID NO: 4 [Soybean (XP_003517716.1)], a fifth polypeptide with at least 70% sequence identity, at least 75% sequence identity, at least 80% sequence identity, at least 85% sequence identity, at least 90% sequence identity, at least 95% sequence identity, at least 96% sequence identity, at least 97% sequence identity, at least 98% sequence identity, or at least 99% sequence identity to SEQ ID NO: 5 [Phaseolus (XP_007157313.1)], a sixth polypeptide with at least 70% sequence identity, at least 75% sequence identity, at least 80% sequence identity, at least 85% sequence identity, at least 90% sequence identity, at least 95% sequence identity, at least 96% sequence identity, at least 97% sequence identity, at least 98% sequence identity, or at least 99% sequence identity to SEQ ID NO: 6 [Populus (XP_002322185.1)], a seventh polypeptide with at least 70% sequence identity, at least 75% sequence identity, at least 80% sequence identity, at least 85% sequence identity, at least 90% sequence identity, at least 95% sequence identity, at least 96% sequence identity, at least 97% sequence identity, at least 98% sequence identity, or at least 99% sequence identity to SEQ ID NO: 7 [Malus (XP_008340354.1)], an eighth polypeptide with at least 70% sequence identity, at least 75% sequence identity, at least 80% sequence identity, at least 85% sequence identity, at least 90% sequence identity, at least 95% sequence identity, at least 96% sequence identity, at least 97% sequence identity, at least 98% sequence identity, or at least 99% sequence identity to SEQ ID NO: 8 [Vitis (XP_002272814.2)], a ninth polypeptide with at least 70% sequence identity, at least 75% sequence identity, at least 80% sequence identity, at least 85% sequence identity, at least 90% sequence identity, at least 95% sequence identity, at least 96% sequence identity, at least 97% sequence identity, at least 98% sequence identity, or at least 99% sequence identity to SEQ ID NO: 9 [Theobroma (XP_007036352.1)], a tenth polypeptide with at least 70% sequence identity, at least 75% sequence identity, at least 80% sequence identity, at least 85% sequence identity, at least 90% sequence identity, at least 95% sequence identity, at least 96% sequence identity, at least 97% sequence identity, at least 98% sequence identity, or at least 99% sequence identity to SEQ ID NO: 10 [Ricinus (XP_002527912.1)], an eleventh polypeptide with at least 70% sequence identity, at least 75% sequence identity, at least 80% sequence identity, at least 85% sequence identity, at least 90% sequence identity, at least 95% sequence identity, at least 96% sequence identity, at least 97% sequence identity, at least 98% sequence identity, or at least 99% sequence identity to SEQ ID NO: 11 [Fragaria (XP_004300916.1)], a twelfth polypeptide with at least 70% sequence identity, at least 75% sequence identity, at least 80% sequence identity, at least 85% sequence identity, at least 90% sequence identity, at least 95% sequence identity, at least 96% sequence identity, at least 97% sequence identity, at least 98% sequence identity, or at least 99% sequence identity to SEQ ID NO: 12 [Maize (XP_008657477.1)], a thirteenth polypeptide with at least 70% sequence identity, at least 75% sequence identity, at least 80% sequence identity, at least 85% sequence identity, at least 90% sequence identity, at least 95% sequence identity, at least 96% sequence identity, at least 97% sequence identity, at least 98% sequence identity, or at least 99% sequence identity to SEQ ID NO: 13 [Rice (XP_015628733.1)], a fourteenth polypeptide with at least 70% sequence identity, at least 75% sequence identity, at least 80% sequence identity, at least 85% sequence identity, at least 90% sequence identity, at least 95% sequence identity, at least 96% sequence identity, at least 97% sequence identity, at least 98% sequence identity, or at least 99% sequence identity to SEQ ID NO: 14 [Wheat (CDM80098.1)], and a fifteenth polypeptide with at least 70% sequence identity, at least 75% sequence identity, at least 80% sequence identity, at least 85% sequence identity, at least 90% sequence identity, at least 95% sequence identity, at least 96% sequence identity, at least 97% sequence identity, at least 98% sequence identity, or at least 99% sequence identity to SEQ ID NO: 15 [Barley (MLOC_5489.2)].
   79. The genetically altered plant or part thereof of embodiment 78, wherein the heterologous EPR3 or EPR3-like polypeptide is selected from the group consisting of SEQ ID NO: 1 [L. japonicus (EPR3)], SEQ ID NO: 2 [Chickpea (XP_004489790.1)], SEQ ID NO: 3 [Medicago (XP_003613165.1)], SEQ ID NO: 4 [Soybean (XP_003517716.1)], SEQ ID NO: 5 [Phaseolus (XP_007157313.1)], SEQ ID NO: 6 [Populus (XP_002322185.1)], SEQ ID NO: 7 [Malta (XP_008340354.1)], SEQ ID NO: 8 [Vitis (XP_002272814.2)], SEQ ID NO: 9 [Theobroma (XP_007036352.1)], SEQ ID NO: 10 [Ricinus (XP_002527912.1)], SEQ ID NO: 11 [Fragaria (XP_004300916.1)], SEQ ID NO: 12 [Maize (XP_008657477.1)], SEQ ID NO: 13 [Rice (XP_015628733.1)], SEQ ID NO: 14 [Wheat (CDM80098.1)], and SEQ ID NO: 15 [Barley (MLOC_5489.2)].
   80. The genetically altered plant or part thereof of any one of embodiments 74-79, wherein the modified EPR3a or EPR3a-like polypeptide comprises a modified ectodomain that has been replaced with all or a portion of an ectodomain of the heterologous EPR3a or EPR3a-like polypeptide, optionally all or a part of the M1 domain, the M2 domain, the LysM3 domain, or all three.
   81. The genetically altered plant or part thereof of embodiment 80, wherein the portion replaced is at least 10%, at least 20%, at least 30%, at least 40%, at least 50%, at least 60%, at least 70%, at least 80%, at least 90%, less than 10%, less than 20%, less than 30%, less than 40%, less than 50%, less than 60%, less than 70%, less than 80%, or less than 90%, of the ectodomain or, optionally all or a part of the M1 domain, the M2 domain, the LysM3 domain, or all three.
   82. The genetically altered plant or part thereof of any one of embodiments 75-81, wherein the modified EPR3 or EPR3-like polypeptide comprises a modified ectodomain that has been replaced with all or a portion of an ectodomain of the heterologous EPR3 or EPR3-like polypeptide, optionally all or a part of the M1 domain, the M2 domain, the LysM3 domain, or all three.
   83. The genetically altered plant or part thereof of embodiment 82, wherein the portion replaced is at least 10%, at least 20%, at least 30%, at least 40%, at least 50%, at least 60%, at least 70%, at least 80%, at least 90%, less than 10%, less than 20%, less than 30%, less than 40%, less than 50%, less than 60%, less than 70%, less than 80%, or less than 90%, of the ectodomain or, optionally all or a part of the M1 domain, the M2 domain, the LysM3 domain, or all three.
   84. The genetically altered plant or part thereof of any one of embodiments 75-83, wherein the heterologous EPR3a or EPR3a-like polypeptide and the heterologous EPR3 or EPR3-like polypeptide are from the same plant species or the same plant variety.
   85. The genetically altered plant or part thereof of any one of embodiments 74-84, wherein the expression of the heterologous EPR3a or EPR3a-like polypeptide or the modified EPR3a or EPR3a-like polypeptide allows the plant or part thereof to recognize an EPS, a beta-glucan, a cyclic beta-glucan, a LPS, or a surface carbohydrate produced by the microbe.
   86. The genetically altered plant or part thereof of any one of embodiments 75-85, wherein the expression of the heterologous EPR3 or EPR3-like polypeptide or the modified EPR3 or EPR3-like polypeptide allows the plant or part thereof to recognize an EPS, a beta-glucan, a cyclic beta-glucan, a LPS, or a surface carbohydrate produced by the microbe.
   87. The genetically altered plant or part thereof of embodiment 86, wherein the expression of the heterologous EPR3a or EPR3a-like polypeptide or the modified EPR3a or EPR3a-like polypeptide and the expression of the heterologous EPR3 or EPR3-like polypeptide or the modified EPR3 or EPR3-like polypeptide allows the plant or part thereof to recognize an EPS, a beta-glucan, a cyclic beta-glucan, a LPS, or a surface carbohydrate produced by the microbe.
   88. The genetically altered plant or part thereof of any one of embodiments 85-87, wherein the microbe is a commensal bacteria, optionally a nitrogen-fixing bacteria, or a mycorrhizal fungi.
   89. The genetically altered plant or part thereof of embodiment 88, wherein the nitrogen-fixing bacteria is selected from the group consisting of Mesorhizobium loti, Mesorhizobium huakuii, Mesorhizobium mediterraneum, Mesorhizobium ciceri, Mesorhizobium spp., Rhizobium mongolense, Rhizobium tropici, Rhizobium etli phaseoli, Rhizobium giardinii, Rhizobium leguminosarum optionally R. leguminosarum trifolii, R. leguminosarum viciae, and R. leguminosarum phaseoli, Burkholderiales optionally symbionts of Mimosa, Sinorhizobium meliloti, Sinorhizobium medicae, Sinorhizobium fredii, Sinorhizobium fredii NGR234, Azorhizobium caulinodans, Bradyrhizobium japonicum, Bradyrhizobium elkanii, Bradyrhizobium liaonginense, Rhizobium spp., Mesorhizobium spp., Sinorhizobium spp., Azorhizobium spp. Frankia spp., and any combination thereof, or the mycorrhizal fungi is selected from the group consisting of Acaulosporaceae spp., Diversisporaceae spp., Gigasporaceae spp., Pacisporaceae spp., Funneliformis spp., Glomus spp., Rhizophagus spp., Sclerocystis spp., Septoglomus spp., Claroideoglomus spp., Ambispora spp., Archaeospora spp., Geosiphon pyriformis, Paraglomus spp., other species in the division Glomeromycota, and any combination thereof.
   90. The genetically altered plant or part thereof of any one of embodiments 74-89, wherein the heterologous EPR3a or EPR3a-like polypeptide or the modified EPR3a or EPR3a-like polypeptide is localized to a plant cell plasma membrane.
   91. The genetically altered plant or part thereof of any one of embodiments 75-90, wherein the heterologous EPR3 or EPR3-like polypeptide or the modified EPR3 or EPR3-like polypeptide is localized to a plant cell plasma membrane.
   92. The genetically altered plant or part thereof of embodiment 90 or embodiment 91, wherein the plant cell is a root cell.
   93. The genetically altered plant or part thereof of embodiment 92, wherein the root cell is a root epidermal cell or a root cortex cell.
   94. The genetically altered plant or part thereof of any one of embodiments 74-93, wherein the heterologous EPR3a or EPR3a-like polypeptide or the modified EPR3a or EPR3a-like polypeptide is expressed in a developing plant root system.
   95. The genetically altered plant or part thereof of any one of embodiments 75-94, wherein the heterologous EPR3 or EPR3-like polypeptide or the modified EPR3 or EPR3-like polypeptide is expressed in a developing plant root system.
   96. The genetically altered plant or part thereof of any one of embodiments 74-95, wherein the first nucleic acid sequence is operably linked to a first promoter.
   97. The genetically altered plant or part thereof of embodiment 96, wherein the first promoter is a root specific promoter, and wherein the root specific promoter is optionally selected from the group consisting of a NFR1 or NFR5/NFP promoter, an EPR3 or an EPR3a promoter, a Lotus NFR5 promoter, a Lotus NFR1 promoter, a maize allothioneine promoter, a chitinase promoter, a maize ZRP2 promoter, a tomato LeExt1 promoter, a glutamine synthetase soybean root promoter, a RCC3 promoter, a rice antiquitine promoter, a LRR receptor kinase promoter, and an Arabidopsis pCO2 promoter.
   98. The genetically altered plant or part thereof of embodiment 96, wherein the first promoter is a constitutive promoter, and wherein the constitutive promoter is optionally selected from the group consisting of a CaMV35S promoter, a derivative of the CaMV35S promoter, a maize ubiquitin promoter, a trefoil promoter, a vein mosaic cassava virus promoter, and a Arabidopsis UBQ10 promoter.
   99. The genetically altered plant or part thereof of any one of embodiments 75-98, wherein the second nucleic acid sequence is operably linked to a second promoter.
   100. The genetically altered plant or part thereof of embodiment 99, wherein the second promoter is a root specific promoter, and wherein the root specific promoter is optionally selected from the group consisting of a NFR1 or NFR5/NFP promoter, an EPR3 or an EPR3a promoter, a Lotus NFR5 promoter, a Lotus NFR1 promoter, a maize allothioneine promoter, a chitinase promoter, a maize ZRP2 promoter, a tomato LeExt1 promoter, a glutamine synthetase soybean root promoter, a RCC3 promoter, a rice antiquitine promoter, a LRR receptor kinase promoter, and an Arabidopsis pCO2 promoter.
   101. The genetically altered plant or part thereof of embodiment 99, wherein the second promoter is a constitutive promoter, and wherein the constitutive promoter is optionally selected from the group consisting of a CaMV35S promoter, a derivative of the CaMV35S promoter, a maize ubiquitin promoter, a trefoil promoter, a vein mosaic cassava virus promoter, and an Arabidopsis UBQ10 promoter.
   102. The genetically altered plant or part thereof of any one of embodiments 74-101, wherein the plant is selected from the group consisting of cassava, corn, cowpea, rice, barley, wheat, Trema spp., apple, pear, plum, apricot, peach, almond, walnut, strawberry, raspberry, blackberry, red currant, black currant, melon, cucumber, pumpkin, squash, grape, tomato, pepper, and hemp.
   103. The genetically altered plant part of any one of embodiments 74-102, wherein the plant part is a leaf, a stem, a root, a root primordia, a flower, a seed, a fruit, a kernel, a grain, a cell, or a portion thereof.
   104. The genetically altered plant part of embodiment 103, wherein the part is a fruit, a kernel, or a grain.
   105. A pollen grain or an ovule of the genetically altered plant of any one of embodiments 74-101.
   106. A protoplast produced from the plant of any one of embodiments 74-101.
   107. A tissue culture produced from protoplasts or cells from the plant of any one of embodiments 74-101, wherein the cells or protoplasts are produced from a plant part selected from the group consisting of leaf, anther, pistil, stem, petiole, root, root primordia, root tip, fruit, seed, flower, cotyledon, hypocotyl, embryo, and meristematic cell.
   108. A method of producing the genetically altered plant of any one of embodiments 74-101, comprising introducing a genetic alteration to the plant comprising the first nucleic acid sequence encoding the heterologous EPR3a or EPR3a-like polypeptide.
   109. The method of embodiment 108, wherein the first nucleic acid sequence is operably linked to a first promoter.
   110. The method of embodiment 109, wherein the first promoter is a root specific promoter, and wherein the root specific promoter is optionally selected from the group consisting of a NFR1 or NFR5/NFP promoter, an EPR3 or an EPR3a promoter, a Lotus NFR5 promoter, a Lotus NFR1 promoter, a maize allothioneine promoter, a chitinase promoter, a maize ZRP2 promoter, a tomato LeExt1 promoter, a glutamine synthetase soybean root promoter, a RCC3 promoter, a rice antiquitine promoter, a LRR receptor kinase promoter, and an Arabidopsis pCO2 promoter.
   111. The method of embodiment 109, wherein the first promoter is a constitutive promoter, and wherein the constitutive promoter is optionally selected from the group consisting of a CaMV35S promoter, a derivative of the CaMV35S promoter, a maize ubiquitin promoter, a trefoil promoter, a vein mosaic cassava virus promoter, and an Arabidopsis UBQ10 promoter.
   112. The method of any one of embodiments 75-111, further comprising introducing a genetic alteration to the plant comprising the second nucleic acid sequence encoding the heterologous EPR3 or EPR3-like polypeptide.
   113. The method of embodiment 112, wherein the second nucleic acid sequence is operably linked to a second promoter.
   114. The method of embodiment 113, wherein the second promoter is a root specific promoter, and wherein the root specific promoter is optionally selected from the group consisting of a NFR1 or NFR5/NFP promoter, an EPR3 or an EPR3a promoter, a Lotus NFR5 promoter, a Lotus NFR1 promoter, a maize allothioneine promoter, a chitinase promoter, a maize ZRP2 promoter, a tomato LeExt1 promoter, a glutamine synthetase soybean root promoter, a RCC3 promoter, a rice antiquitine promoter, a LRR receptor kinase promoter, and an Arabidopsis pCO2 promoter.
   115. The method of embodiment 113, wherein the second promoter is a constitutive promoter, and wherein the constitutive promoter is optionally selected from the group consisting of a CaMV35S promoter, a derivative of the CaMV35S promoter, a maize ubiquitin promoter, a trefoil promoter, a vein mosaic cassava virus promoter, and an Arabidopsis UBQ10 promoter.
   116. The method of any one of embodiments 108-115, wherein the first nucleic acid sequence is inserted into the genome of the plant so that the nucleic acid sequence is operably linked to a first endogenous promoter.
   117. The method of embodiment 116, wherein the first endogenous promoter is a root specific promoter.
   118. The method of any one of embodiments 112-117, wherein the second nucleic acid sequence is inserted into the genome of the plant so that the nucleic acid sequence is operably linked to a second endogenous promoter.
   119. The method of embodiment 118, wherein the second endogenous promoter is a root specific promoter.
   120. A method of producing the genetically altered plant of any one of embodiments 80-119, comprising genetically editing a gene encoding an endogenous LysM receptor polypeptide in the plant to comprise the modified ectodomain.
   121. The method of embodiment 120, wherein the endogenous LysM receptor polypeptide is an endogenous EPR3a or EPR3a-like polypeptide.
   122. The method of embodiment 120 or embodiment 121, wherein the modified EPR3a or EPR3a-like polypeptide was generated by:
[0059] (a) providing a heterologous EPR3a or EPR3a-like polypeptide model comprising a structural model, a molecular model, a surface characteristics model, and/or an electrostatic potential model of a M1 domain, a M2 domain, a LysM3 domain, any combination thereof, or the ectodomain of the heterologous EPR3a or EPR3a-like polypeptide having selectivity for the beneficial commensal microbe and an unmodified EPR3a or EPR3a-like polypeptide;
[0060] (b) identifying one or more amino acid residues for modification in the unmodified EPRa3 polypeptide by comparing amino acid residues of a oligosaccharide binding feature in the unmodified EPR3a or EPR3a-like polypeptide with the corresponding amino acid residues in the heterologous EPR3a or EPR3a-like polypeptide model; and
[0061] (c) generating the unmodified EPR3a or EPR3a-like polypeptide wherein the one or more amino acid residues in the oligosaccharide binding feature of the unmodified EPR3a or EPR3a-like polypeptide have been substituted with corresponding amino acid residues from the heterologous EPR3a or EPR3a-like polypeptide.
   123. The method of embodiment 122, wherein the heterologous EPR3a or EPR3a-like polypeptide model is a protein crystal structure, a molecular model, a cryo-EM structure, and a NMR structure.
   124. The method of embodiment 120, wherein the endogenous LysM receptor polypeptide is an endogenous EPR3 or EPR3-like polypeptide.
   125. The method of embodiment 124, wherein the modified EPR3 or EPR3-like polypeptide was generated by:
[0062] (a) providing a heterologous EPR3 or EPR3-like polypeptide model comprising a structural model, a molecular model, a surface characteristics model, and/or an electrostatic potential model of a M1 domain, a M2 domain, a LysM3 domain, any combination thereof, or the ectodomain of the heterologous EPR3 or EPR3-like polypeptide having selectivity for the beneficial commensal microbe and an unmodified EPR3 or EPR3-like polypeptide;
[0063] (b) identifying one or more amino acid residues for modification in the unmodified EPR3 or EPR3-like polypeptide by comparing amino acid residues of a oligosaccharide binding feature in the unmodified EPR3 or EPR3-like polypeptide with the corresponding amino acid residues in the heterologous EPR3 or EPR3-like polypeptide model; and
[0064] (c) generating the unmodified EPR3 or EPR3-like polypeptide wherein the one or more amino acid residues in the oligosaccharide binding feature of the unmodified EPR3 or EPR3-like polypeptide have been substituted with corresponding amino acid residues from the heterologous EPR3 or EPR3-like polypeptide.
   126. The method of embodiment 125, wherein the heterologous EPR3 or EPR3-like polypeptide model is a protein crystal structure, a molecular model, a cryo-EM structure, and a NMR structure.
   127. A plant or part thereof produced by the method of any one of embodiments 108-126.
   128. A method of identifying a beneficial commensal microbe capable of participating in a plant root microbiota comprising:
[0065] a) providing a first polypeptide comprising an EPR3 or EPR3-like polypeptide, an ectodomain of an EPR3 or EPR3-like polypeptide, a M1 domain of an EPR3 or EPR3-like polypeptide, a M2 domain of an EPR3 or EPR3-like polypeptide, or a LysM3 domain of an EPR3 or EPR3-like polypeptide of the plant;
[0066] b) contacting the first polypeptide with a sample comprising a microbe or an EPS, a beta-glucan, a cyclic beta-glucan, a LPS, or a surface carbohydrate produced by the microbe; and
[0067] c) detecting binding of the EPS, the beta-glucan, the cyclic beta-glucan, the LPS, or the surface carbohydrate produced by the microbe to the polypeptide, wherein binding of the EPS, the beta-glucan, the cyclic beta-glucan, the LPS, or the surface carbohydrate to the polypeptide indicates that the microbe is a beneficial commensal microbe capable of participating in a plant root microbiota; optionally, the detecting is by a functional assay optionally selected from (i) detecting enrichment of taxa in Burkholderiales and/or Rhizobiales in a plant rhizosphere or endosphere, wherein enrichment of taxa in Burkholderiales and/or Rhizobiales in the plant rhizosphere or endosphere indicates that the microbe is a beneficial commensal microbe capable of participating in a plant root microbiota; optionally, (ii) detecting nodulation in a plant root system, wherein nodulation indicates that the microbe is a beneficial commensal microbe capable of participating in a plant root microbiota; and/or (iii) detecting mycorrhization in a plant root system, wherein mycorrhization indicates that the microbe is a beneficial commensal microbe capable of participating in a plant root microbiota, or optionally the detecting is by a direct binding assay optionally selected from (1) a competition assay optionally with a known signaling saccharide, or (2) an affinity assay optionally wherein the detected affinity is compared to the affinity for the known signaling saccharide.
   129. The method of embodiment 128, further comprising providing a second polypeptide comprising an EPR3a or EPR3a-like polypeptide, an ectodomain of an EPR3a or EPR3a-like polypeptide, a M1 domain of an EPR3a or EPR3a-like polypeptide, a M2 domain of an EPR3a or EPR3a-like polypeptide, or a LysM3 domain of an EPR3a or EPR3a-like polypeptide of the plant in step (a), wherein the second polypeptide is in contact with the first polypeptide.
   130. The method of embodiment 128 or embodiment 129, further comprising step (d) culturing the beneficial commensal microbe if binding is detected in step (c).
   131. The method of embodiment 130, further comprising step (e) applying the beneficial commensal microbe to the plant or a part thereof.
   132. The method of embodiment 131, wherein the plant part is a plant propagation material, optionally a seed, a tuber, or a plantlet, and the beneficial commensal microbe is applied to the plant propagation material, optionally to the seed as part of a seed coating, to the tuber, or to a root of the plantlet.
   133. The method of embodiment 131, wherein the plant part is a plant vegetative or reproductive material, optionally a root, a shoot, a stem, a pollen grain, or an ovule, and the beneficial commensal microbe is applied to the plant vegetative or reproductive material of the plant, optionally as part of a coating, a solution, or a powder.
   134. The method of embodiment 130 further comprising step (e) applying the beneficial commensal microbe, optionally in admixture with a soil-compatible carrier, a fungal carrier, or a growth medium, optionally soil, where the plant is growing or is to be grown.
   135. The method of any one of embodiments 128-134, wherein the beneficial commensal microbe is a commensal bacteria, optionally a nitrogen-fixing bacteria, or a mycorrhizal fungi.
   136. A method of identifying a beneficial commensal microbe capable of participating in a plant root microbiota comprising:
[0068] a) providing a first polypeptide comprising an EPR3a or EPR3a-like polypeptide, an ectodomain of an EPR3a or EPR3a-like polypeptide, a M1 domain of an EPR3a or EPR3a-like polypeptide, a M2 domain of an EPR3a or EPR3a-like polypeptide, or a LysM3 domain of an EPR3a or EPR3a-like polypeptide of the plant;
[0069] b) contacting the first polypeptide with a sample comprising a microbe or an EPS, a beta-glucan, a cyclic beta-glucan, a LPS, or a surface carbohydrate produced by the microbe; and
[0070] c) detecting binding of the EPS, the beta-glucan, the cyclic beta-glucan, the LPS, or the surface carbohydrate produced by the microbe to the polypeptide, wherein binding of the EPS, the beta-glucan, the cyclic beta-glucan, the LPS, or the surface carbohydrate to the polypeptide indicates that the microbe is a beneficial commensal microbe capable of participating in the plant root microbiota; optionally, the detecting is by a functional assay optionally selected from (i) detecting enrichment of taxa in Burkholderiales and/or Rhizobiales in a plant rhizosphere or endosphere, wherein enrichment of taxa in Burkholderiales and/or Rhizobiales in the plant rhizosphere or endosphere indicates that the microbe is a beneficial commensal microbe capable of participating in a plant root microbiota; optionally, (ii) detecting nodulation in a plant root system, wherein nodulation indicates that the microbe is a beneficial commensal microbe capable of participating in a plant root microbiota; and/or (iii) detecting mycorrhization in a plant root system, wherein mycorrhization indicates that the microbe is a beneficial commensal microbe capable of participating in a plant root microbiota, or optionally the detecting is by a direct binding assay optionally selected from (1) a competition assay optionally with a known signaling saccharide, or (2) an affinity assay optionally wherein the detected affinity is compared to the affinity for the known signaling saccharide.
   137. The method of embodiment 136, further comprising providing a second polypeptide comprising an EPR3 or EPR3-like polypeptide, an ectodomain of an EPR3 or EPR3-like polypeptide, a M1 domain of an EPR3 or EPR3-like polypeptide, a M2 domain of an EPR3 or EPR3-like polypeptide, or a LysM3 domain of an EPR3 or EPR3-like polypeptide of the plant in step (a), wherein the second polypeptide is in contact with the first polypeptide.
   138. The method of embodiment 136 or embodiment 137, further comprising step (d) culturing the beneficial commensal microbe if binding is detected in step (c).
   139. The method of embodiment 138, further comprising step (e) applying the beneficial commensal microbe to the plant or a part thereof.
   140. The method of embodiment 139, wherein the plant part is a plant propagation material, optionally a seed, a tuber, or a plantlet, and the beneficial commensal microbe is applied to the plant propagation material, optionally to the seed as part of a seed coating, to the tuber, or to a root of the plantlet.
   141. The method of embodiment 139, wherein the plant part is a plant vegetative or reproductive material, optionally a root, a shoot, a stem, a pollen grain, or an ovule, and the beneficial commensal microbe is applied to the plant vegetative or reproductive material of the plant, optionally as part of a coating, a solution, or a powder.
   142. The method of embodiment 138 further comprising step (e) applying the beneficial commensal microbe, optionally in admixture with a soil-compatible carrier, a fungal carrier, or a growth medium, optionally soil, where the plant is growing or is to be grown.
   143. The method of any one of embodiments 136-142, wherein the beneficial commensal microbe is a commensal bacteria, optionally a nitrogen-fixing bacteria, or a mycorrhizal fungi.

### BRIEF DESCRIPTION OF THE DRAWINGS

[0071] The patent or application file contains at least one drawing executed in color. Copies of this patent or patent application publication with color drawing(s) will be provided by the Office upon request and payment of the necessary fee.

[0072] FIGS. 1A-1D show purification of the EPR3 ectodomain (ED)-Nb186 complex and the crystal structure of the EPR3 ED-Nb186 complex. FIG. 1A shows overlay of gel filtration runs with EPR3 ED (EPR3; light gray), Nb186 (dark gray), and the EPR3 ED-Nb186 complex (EPR3-Nb186; gray) (x-axis shows elution volume in ml; y-axis shows absorbance (Abs.) at 280 nm (mAU)). FIG. 1B shows SDS-PAGE of the EPR3 ED-Nb186 complex used for crystallization with the bands corresponding to EPR3 ED (EPR3) and Nb186 labeled on the right, and the molecular weights of the protein bands provided on the left in kilodaltons (kDa). FIG. 1C shows a representative image of a single EPR3 ED-Nb186 crystal. FIG. 1D shows the crystal structure of the EPR3 ED-Nb186 complex in two views (right view rotated 90° relative to left view), with Nb186 colored in dark gray (N-terminus (N) and C-terminus (C) are labeled) and EPR3 ED colored in shades of lighter gray (N-terminus (N), M1 domain (M1; gray), M2 domain (M2; light gray), LysM3 domain (LysM3; light gray), and C-terminus (C) are labeled).

[0073] FIGS. 2A-2D show the crystal structure of the EPR3 ED. FIG. 2A shows a cartoon representation of the EPR3 ED crystal structure in two views (right view rotated 90° relative to left view) with differently colored domains (M1 in gray; M2 in light gray; and LysM3 in light gray) having labels indicating the N and C termini, secondary structures (M1 α-helix is numbered α1, M1 β-sheets are numbered β1, β2, and β3; M2 α-helix is numbered α2, M2 β-sheets are numbered β4 and β5; LysM3 α-helices are numbered α3 and a4, and LysM3 β-sheets are numbered β6 and 137), and disulfide bridges indicated with arrows and the corresponding connected residues (C98-C155, C47-C100, and C54-C157). FIG. 2B shows the EPR3 ED carbohydrate-binding domain M1 with labels indicating the N and C termini and secondary structures (α1, β1, β2, and β3) (top), and M1 with labels indicating the N and C termini superimposed to the corresponding LysM1 domain in CERK6 (PDB-5LS2) colored in light gray (bottom). FIG. 2C shows the EPR3 ED carbohydrate-binding module M2 with labels indicating the N and C termini and secondary structures (α2, β4, and β5) (top), and M2 with labels indicating the N and C termini superimposed to the corresponding LysM2 domain in CERK6 (PDB-5LS2) colored in light gray (bottom). FIG. 2D shows the EPR3 ED carbohydrate-binding module LysM3 with labels indicating the N and C termini and secondary structures (α3, α4, β6, and β7) (top), and LysM3 with labels indicating the N and C termini superimposed to the corresponding LysM3 domain in CERK6 (PDB-5LS2) colored in light gray (bottom).

[0074] FIGS. 3A-3F show small-angle X-ray scattering (SAXS) analysis of the EPR3 ED and the stem region of EPR4 homologs alignment logo. FIG. 3A shows the EPR3 ED SAXS scattering curve with model fit (χ²=1.093; x-axis in s(Å⁻¹); y-axis in log(I)). FIG. 3B shows the EPR3 ED SAXS Guinier plot. FIG. 3C shows the EPR3 ED SAXS pair distance distribution (P(r)) plot with a Dₘₐₓ of 73.4 Å. FIG. 3D shows docking of the EPR3 ED crystal structure into the SAXS envelope showing an extended stem-like structure. The overall dimensions are shown in angstrom (Å; height ˜73 Å, width ˜45 Å, stem length ˜36 Å). FIG. 3E shows a model of the EPR3 receptor where the stem structure of the EPR3 ED positions the EPR3 ED with a distance to the plasma membrane (PM), and connects the EPR3 ED to the transmembrane domain (gray bar in PM) and the cell-internal kinase domain (kinase; gray oval). FIG. 3F shows the alignment logo of the stem region of EPR3 homologs with the sequence of the stem region of L. japonicus EPR3 shown below (SEQ ID NO: 188).

[0075] FIGS. 4A-4C show sequence alignments of the EPR3 ED M1, M2, and LysM3 domains from EPR3 homologs in dicot (legumes and non-legumes) and monocot species L. japonicus (BAI79269.1), Cicer arietinum (Chickpea; XP_004489790.1), Medicago truncatula (XP_003613165.1), Glycine max (Soybean XP_003517716.1), Phaseolus vulgaris (XP_007157313.1), Populus trichocarpa (XP_002322185.1), Malus domestica (XP_008340354.1), Vitis vinifera (XP_002272814.2), Theobroma cacao (XP_007036352.1), Ricinus communis (XP_002527912.1), Fragaria vesca subsp. vesca (XP_004300916.1), Zea mays (Maize; XP_008657477.1), Oryza sativa Japonica Group (Rice; XP_015628733.1), Triticum aestivum (Wheat; CDM80098.1), and Hordeum vulgare (Barley; MLOC_5489.2). FIG. 4A shows sequence alignment of EPR3 ED homologs showing the conserved secondary structure arrangement of the M1 domain (βαββ fold). The β-sheet β1″ is highlighted in gray with darker gray text, the α-helix “α1” is highlighted in gray with darker gray text, the β-sheet “β2” is highlighted in light gray with gray text, the β sheet “β3” is highlighted gray with darker gray text, and conserved cysteine residues are highlighted in dark gray with black text (Lotus=SEQ ID NO: 16, Chickpea=SEQ ID NO: 17, Medicago=SEQ ID NO: 18, Soybean=SEQ ID NO: 19, Phaseolus=SEQ ID NO: 20, Populus=SEQ ID NO: 21, Malus=SEQ ID NO: 22, Vitis=SEQ ID NO: 23, Theobroma=SEQ ID NO: 24, Ricinus=SEQ ID NO: 25, Fragaria=SEQ ID NO: 26, Maize=SEQ ID NO: 27, Rice=SEQ ID NO: 28, Wheat=SEQ ID NO: 29, Barley=SEQ ID NO: 30; Consensus=SEQ ID NO: 189). FIG. 4B shows sequence alignment of EPR3 ED homologs showing the conserved secondary structure arrangement of the M2 domain (βαβ fold). The β-sheets “β4” and “β5” are highlighted in light gray with gray text, the α-helix “α2” is highlighted in light gray with gray text, and conserved cysteine residues are highlighted in dark gray with black text (Lotus=SEQ ID NO: 31, Chickpea=SEQ ID NO: 32, Medicago=SEQ ID NO: 33, Soybean=SEQ ID NO: 34, Phaseolus=SEQ ID NO: 35, Populus=SEQ ID NO: 36, Malus=SEQ ID NO: 37, Vitis=SEQ ID NO: 38, Theobroma=SEQ ID NO: 39, Ricinus=SEQ ID NO: 40, Fragaria=SEQ ID NO: 41, Maize=SEQ ID NO: 42, Rice=SEQ ID NO: 43, Wheat=SEQ ID NO: 44, Barley=SEQ ID NO: 45; Consensus=SEQ ID NO: 190). FIG. 4C shows sequence alignment of EPR3 ED homologs showing the conserved secondary structure arrangement of the LysM3 domain (βααβ fold). The β-sheets “β6” and “β7” are highlighted in light gray with gray text, and the α-helices “α3” and “α4” are highlighted in light gray with dark gray text (Lotus=SEQ ID NO: 46, Chickpea=SEQ ID NO: 47, Medicago=SEQ ID NO: 48, Soybean=SEQ ID NO: 49, Phaseolus=SEQ ID NO: 50, Populus=SEQ ID NO: 51, Malus=SEQ ID NO: 52, Vitis=SEQ ID NO: 53, Theobroma=SEQ ID NO: 54, Ricinus=SEQ ID NO: 55, Fragaria=SEQ ID NO: 56, Maize=SEQ ID NO: 57, Rice=SEQ ID NO: 58, Wheat=SEQ ID NO: 59, Barley=SEQ ID NO: 60; Consensus=SEQ ID NO: 191).

[0076] FIGS. 5A-5C show structural modelling of the M1 domain from EPR3 homologs. FIG. 5A shows ab-initio models of the EPR3 M1 domain from receptor homologs revealing conserved βαββ structures. Molecular fits (root-mean-square deviation of atomic position, noted as RMSD values) based on superposition of these modelled M1 domains to the crystal structure of the EPR3 ED M1 domain are denoted in A (Angstrom). The N- and C-termini of the domains are labeled. FIG. 5B shows a side-by-side comparison of the L. japonicus EPR3 ED crystal structure of the M1 domain (Lotus EPR3 M1—crystal structure; left) and an ab-initio atomic-level force field model of L. japonicus EPR3 ED M1 (Lotus EPR3 M1—modelled; right). The β-sheets and α-helix secondary structures that make up the βαββ fold of the M1 domain (α1, β1, β2, and β3), and the N- and C-termini are labeled. FIG. 5C shows modelling of the M1 domain from EPR3 homologs, revealing the same overall βαββ arrangement. Models of the M1 domain from L. japonicus EPR3 and EPR3 homologs from Chickpea, Medicago, Soybean, Phaseolus, Populus, Malus, Vitis, Theobroma, Ricinus, Fragaria, Maize, and Wheat. The molecular fit (root-mean-square deviation of atomic positions, or RMSD) in A to the crystal structure of EPR3-M1 is noted for each model. The N- and C-termini of the domains are labeled.

[0077] FIG. 6 shows a structural comparison of plant receptors. Structural overviews of the exopolysaccharide (EPS) receptor EPR3 ED (left), the chitin receptor CERK6 ED (center), and the lipo-chitooligosaccharide (LCO) receptor NFP ED (right) are shown. The receptor EDs are colored such that the N-terminal domain (M1 or LysM1) is gray, the center domain (M2 or LysM2) is lighter gray, and the C-terminal domain (LysM3) is light gray, as indicated by the schematic model below the structures. The molecular fit (root-mean-square deviation of atomic positions, or RMSD) in Å between the receptors are indicated, with EPR3 ED to CERK6 ED RMSD=4.150 Å, EPR3 ED to NFP ED RMSD=5.096 Å, and CERK6 ED to NFP ED RMSD=2.059 Å.

[0078] FIGS. 7A-7F show the proposed structures of the exopolysaccharides (EPS) ligands and matrix-assisted laser desorption/ionization time of flight (MALDI-TOF) mass spectrometry spectra are shown. FIG. 7A shows the Mesorhizobium loti strain R7A EPS proposed structure and mass spectrometry spectrum. FIG. 7B shows the M. loti strain R7A deOAc-EPS proposed structure and mass spectrometry spectrum. FIG. 7C shows the M. loti strain R7A exoU EPS proposed structure and mass spectrometry spectrum. FIG. 7D shows the chitohexose (C06) proposed structure. FIG. 7E shows the R. leguminosarum EPS proposed structure and mass spectrometry spectrum. FIG. 7F shows the S. meliloti EPS proposed structure and mass spectrometry spectrum.

[0079] FIGS. 8A-8G show microscale thermophoresis (MST) experiments measuring the binding of the EPR3 ED to exopolysaccharides (EPS). FIG. 8A shows a MST binding experiment with EPR3 ED and M. loti strain R7A EPS. FIG. 8B shows a MST binding experiment with EPR3 ED and M. loti strain R7A exoU EPS. FIG. 8C shows a MST binding experiment with EPR3 ED and chitin (C06). FIG. 8D shows a MST binding experiment with EPR3 ED and M. loti strain R7A de-O-acetylated EPS (deOAc-EPS). FIG. 8E shows a MST binding experiment with EPR3 ED and EPS from R. leguminosarum. FIG. 8F shows a MST binding experiment with EPR3 ED and EPS from S. meliloti. FIG. 8G shows a table summarizing the equilibrium dissociation constants value (K_{d}) in the 95% confidence interval for the different ligands, and “NB” indicates no detectable binding. In FIGS. 8A-8F, the x-axis shows the molar concentration of the EPS ligand (M), the y-axis shows the percent change in normalized fluorescence (ΔFₙₒᵣₘ(%)), and the equilibrium dissociation constant (K_{d}) of each binding curve, the corresponding goodness of fit (R²), and number of replicates performed using independent protein preparations (n) are indicated. “NB” indicates no detectable binding, where applicable.

[0080] FIGS. 9A-9B show microscale thermophoresis (MST) experiments measuring the binding of de-glycosylated EPR3 ED or de-glycosylated EPR3 ED-Nb186 complex to EPS.

[0081] FIG. 9A shows a MST binding experiment with de-glycosylated EPR3 ED and M. loti strain R7A EPS. FIG. 9B shows a MST binding experiment with de-glycosylated EPR3 ED-Nb186 complex and M. loti strain R7A EPS. In FIGS. 9A-9B the x-axis shows the molar concentration of the EPS ligand (M), the y-axis shows the percent change in normalized fluorescence(ΔFₙₒᵣₘ(%)), and the equilibrium dissociation constants (K_{d}) in the 95% confidence interval, goodness of fit (R²), and number of independent protein preparations used for the measurements (n) are reported.

[0082] FIGS. 10A-10C show small-angle X-ray scattering (SAXS) data, fits and models of EPR ED alone, EPR ED in the presence of M. loti strain R7A EPS, or EPR ED in the presence of M. loti strain R7A exoU EPS. FIG. 10A shows SAXS data for EPR3 ED in the absence of ligand with SAXS scattering model fit χ²=1.093, Dₘₐₓ=73.4 Å, and overall dimensions of 73 Å by 45 Å. FIG. 10B shows SAXS data for EPR3 ED in the presence of M. loti strain R7A EPS with SAXS scattering model fit χ²=1.053, Dₘₐₓ=67.3 Å, and overall dimensions of 67 Å by 43 Å. FIG. 10C shows SAXS data for EPR3 ED in the presence of M. loti strain R7A exoU EPS with SAXS scattering model fit χ²=1.158, Dₘₐₓ=72.7 Å, and overall dimensions of 73 Å by 48 Å. In FIGS. 10A-10C, the SAXS scattering curve with model fit (χ²) is shown on left, Guinier plot is shown top middle, pair distance distribution (P(r)) plot with Dₘₐₓ indicated is shown bottom middle, and a model docking the EPR3 ED crystal structure into the SAXS envelope, with overall dimensions of the model shown in angstrom (A) is shown on right.

[0083] FIGS. 11A-11M show comparisons of the L. japonicus Epr3 and Epr3a genes and amino acid sequences, a microscale thermophoresis (MST) experiment measuring the binding of the L. japonicus EPR3a ED to EPS, and a kinase activity assay to measure the activity of the EPR3 and EPR3a kinase domains. FIG. 11A shows Epr3 and Epr3a gene models with the relative sizes and positions of 5′ UTRs shown as dark gray rectangles, exons shown as light gray rectangles, introns shown as black lines, and 3′ UTRs shown as darker gray rectangles. Relative positions of insertion of the Lotus retrotransposon 1 element (LORE1) in the mutant lines are indicated with black triangles and labeled according to the name of the mutant epr3 line (epr3-11 in Epr3; epr3a-1 and epr3a-2 in Epr3a). FIG. 11B shows a protein alignment of L. japonicus EPR3 (SEQ ID NO: 61) and L. japonicus EPR3a (SEQ ID NO: 62). Conserved residues are indicated by a ‘|’, highly similar residues by ‘:’, weakly similar residues by ‘.’ and gaps by ‘-’. FIG. 11C shows a MST binding experiment with L. japonicus EPR3a ED and M. loti EPS. The x-axis shows the molar concentration of the EPS ligand (M), the y-axis shows the percent change in normalized fluorescence (ΔFₙₒᵣₘ(%)); the equilibrium dissociation constant (K_{d}=25.6 μM), and the corresponding goodness of fit (R²=0.98) are indicated. FIG. 11D shows the result of purifying the ectodomain of Lotus EPR3a from insect cells. At left, FIG. 11D provides the results of gel filtration using a Superdex 75 10/300 column (x-axis shows elution volume (Ve) in ml; y-axis shows absorbance (Abs.) at 280 nm (mAU)), with peak absorbance at an elution volume of 11.45 ml. At right, FIG. 11D provides SDS-PAGE of the purified L. japonicus EPR3a ED with samples corresponding to the elution volumes shown at left labeled 8, and 12-16, and the molecular weights of the protein bands provided on the left in kilodaltons (kDa). The well labeled P contains PNGase F, and the well labeled G contains Glycosylated EPR3. The samples in wells 15 and 16 were used for the MST experiments shown in FIGS. 11E-11J. FIGS. 11E-11J show the results of MST experiments measuring binding of the L. japonicus EPR3a ED to polysaccharides. FIG. 11E shows binding of the L. japonicus EPR3a ED to M. loti EPS, with the equilibrium dissociation constant (K_{d}=44.4±11.2 μM), corresponding goodness of fit (R²=0.97), and sample size (n=3) indicated. FIG. 11F shows binding of the L. japonicus EPR3a ED to M. loti de-O-acetylated (deOAc) EPS, with the equilibrium dissociation constant (K_{d}=57.2±15.6 μM), corresponding goodness of fit (R²=0.96), and sample size (n=3) indicated. FIG. 11G shows binding of the L. japonicus EPR3a ED to S. meliloti EPS, with the equilibrium dissociation constant (K_{d}=936.7±389.4 μM), corresponding goodness of fit (R²=0.93), and sample size (n=3) indicated. FIG. 11H shows binding of the L. japonicus EPR3a ED to R. leguminosarum EPS, with the equilibrium dissociation constant (K_{d}=12.5±4.0 μM), corresponding goodness of fit (R²=0.95), and sample size (n=3) indicated. FIG. 11I shows the absence of binding of the L. japonicus EPR3a ED to chitotetraose (C04), with the sample size (n=3) indicated. FIG. 11J shows the absence of binding of the L. japonicus EPR3a ED to maltodextrin (MalDex), with the sample size (n=3) indicated. In each of FIGS. 11E-11J, the x-axis shows the molar concentration of the polysaccharide (M), the y-axis shows the percent change in normalized fluorescence (ΔFₙₒᵣₘ(%)), and the error bars show the 95% confidence interval. FIG. 11K shows kinase activity of L. japonicus EPR3 kinase domains purified from E. coli. FIG. 11L shows kinase activity of L. japonicus EPR3a kinase domains purified from E. coli. FIG. 11M shows kinase activity of L. japonicus EPR3a kinase domains purified from E. coli.

[0084] FIG. 12 shows RNA-seq data from L. japonicus Gifu showing expression of Epr3 (top row) and Epr3a (bottom row) across tissue types when treated with H₂O or the symbiotic bacteria M loti strain R7A. Relative expression is shown in root hairs, roots, nodules, and shoots each treated with either H₂O (mock) or M loci strain R7A (R7A), as indicated. For tissues treated with M. loti strain R7A, the number of days between the collection of the RNA and the treatment with M. loti strain R7A is indicated (dpi, days post inoculation). The normalized expression of Epr3 and Epr3a is indicated by the gray scale shown, with dark gray indicating the highest and lowest levels of relative expression.

[0085] FIGS. 13A-13B show the results of plate nodulation assays of L. japonicus of the indicated genotypes inoculated with different M. loti strains. FIG. 13A shows the results of plate nodulation assays of L. japonicus genotypes with M. loti strain R7A. FIG. 13B shows the results of plate nodulation assays of L. japonicus genotypes with M. loti strain R7AexoY/F. In FIGS. 13A-13B, the L. japonicus genotypes tested were wild type (WT) Gifu, epr3-11 single mutant, epr3a-1 single mutant, epr3a-2 single mutant, and epr3/epr3a double mutant. Both nitrogen-fixing (“Pink”; gray color) and uninfected (“White”; white color) nodules were counted periodically over 35 days. The x-axis shows the number of days post-treatment with M. loti (dpi), and the y-axis shows the number of nodules per plant (n=30/condition). Error bars represent SEM and statistical comparisons between genotypes for pink nodules are shown using ANOVA and Tukey post hoc testing with p-value (<0.05) and different letters indicating a statistically significant difference.

[0086] FIGS. 14A-14C show phenotypes of wild type (WT) L. japonicus Gifu compared to phenotypes of L. japonicus with mutations in epr3 and/or epr3a when inoculated with M. loti strain R7A. FIG. 14A shows pink nodules formed on the indicated genotypes inoculated with M. loti strain R7A at 4 weeks post inoculation. The x-axis indicates the genotype of the plant and the sample size per genotype (Gifu WT, n=25; epr3-11 single mutant, n=39; epr3a-1 single mutant, n=40; epr3a-2 single mutant, n=42; and epr3/epr3a double mutant, n=41) and the y-axis represents the number of nodules per plant. FIG. 14B shows fresh shoot weights of pot grown plants 4 weeks post inoculation with M. loti strain R7A. The x-axis indicates the genotype of the plant and the sample size per genotype (Gifu WT, n=5; epr3-11 single mutant, n=6; epr3a-1 single mutant, n=6; epr3a-2 single mutant, n=6; and epr3/epr3a double mutant, n=6) and the y-axis indicates the weight of the shoot (grams). FIG. 14C shows appearance of the pot-grown plants 4 weeks post inoculation with M. loti strain R7A. The plants are arranged according to genotype (in order: Gifu WT, epr3-11 single mutant, epr3a-1 single mutant, epr3a-2 single mutant, and epr3/epr3a double mutant). For FIGS. 14A-14B, box plots show the first quartile and third quartile with the line indicating the median (dots represent individual measurements); statistical comparisons between genotypes are shown using ANOVA and Tukey post hoc testing with p-value (<0.05), and different letters indicate a statistically significant difference.

[0087] FIGS. 15A-15C show phenotypes of wild-type L. japonicus Gifu compared to phenotypes of L. japonicus with mutations in epr3 and/or epr3a when inoculated with M. loti strain R7AexoY/F. FIG. 15A shows pink nodules formed on the indicated genotypes inoculated with M. loti strain R7AexoY/F at 4 weeks post inoculation. The x-axis indicates the genotype of the plant and the sample size per genotype (Gifu WT, n=42; epr3-11 single mutant, n=39; epr3a-1 single mutant, n=39; epr3a-2 single mutant, n=40; and epr3/epr3a double mutant, n=37) and the y-axis represents the number of nodules per plant. FIG. 15B shows fresh shoot weights of pot grown plants 4 weeks post inoculation with M. loti strain R7AexoY/F. The x-axis indicates the genotype of the plant and the sample size per genotype (Gifu WT, n=6; epr3-11 single mutant, n=6; epr3a-1 single mutant, n=6; epr3a-2 single mutant, n=6; and epr3/epr3a double mutant, n=6) and the y-axis represents shoot weight (grams). FIG. 15C shows the appearance of the pot-grown plants 4 weeks post inoculation with M. loti strain R7AexoY/F. The plants are arranged according to genotype (in order: Gifu WT, epr3-11 single mutant, epr3a-1 single mutant, epr3a-2 single mutant, and epr3/epr3a double mutant). For FIGS. 15A-15B, box plots show the first quartile and third quartile with the line indicating the median (dots represent individual measurements); statistical comparisons between genotypes are shown using ANOVA and Tukey post hoc testing with p-value (<0.05), and different letters indicate a statistically significant difference.

[0088] FIGS. 16A-16C show phenotypes of wild-type L. japonicus Gifu compared to phenotypes of L. japonicus with mutations in epr3 and/or epr3a when inoculated with M. loti strain R7AexoU. FIG. 16A shows pink nodules formed on the indicated genotypes inoculated with M. loti strain R7AexoU at 5 weeks post inoculation. The x-axis indicates the genotype of the plant and the sample size per genotype (Gifu WT, n=36; epr3-11 single mutant, n=32; epr3a-1 single mutant, n=38; epr3a-2 single mutant, n=35; and epr3/epr3a double mutant, n=36) and the y-axis represents the number of nodules per plant. FIG. 16B shows fresh shoot weights of pot grown plants 5 weeks post inoculation with M. loti strain R7AexoU. The x-axis indicates the genotype of the plant and the sample size per genotype (Gifu WT, n=6; epr3-11 single mutant, n=6; epr3a-1 single mutant, n=6; epr3a-2 single mutant, n=6; and epr3/epr3a double mutant, n=6) and the y-axis represents shoot weight (grams). FIG. 16C shows the appearance of the pot grown plants 5 weeks post inoculation with M. loti strain R7AexoU. The plants are arranged according to genotype (in order: Gifu WT, epr3-11 single mutant, epr3a-1 single mutant, epr3a-2 single mutant, and epr3/epr3a double mutant). For FIGS. 16A-16B, box plots show the first quartile and third quartile with the line indicating the median (dots represent individual measurements); statistical comparisons between genotypes are shown using ANOVA and Tukey post hoc testing with p-value (<0.05), and different letters indicate a statistically significant difference.

[0089] FIG. 17 shows the number of infection threads formed on wild-type L. japonicus Gifu compared to phenotypes of L. japonicus with mutations in epr3 and/or epr3a at 8 days post inoculation with M. loti strain R7A. The x-axis indicates the genotype of the plant and the sample size per genotype (Gifu WT, n=20; epr3-11 single mutant, n=20; epr3a-1 single mutant, n=20; epr3a-2 single mutant, n=20; and epr3/epr3a double mutant, n=10) and the y-axis represents the number of infection threads per plant (ITs/plant). The box plots show the first quartile and third quartile with the line indicating the median (dots represent individual measurements); statistical comparisons between genotypes are shown using ANOVA and Tukey post hoc testing with p-value (<0.05), and different letters indicate a statistically significant difference.

[0090] FIGS. 18A-18C show qRT-PCR of the symbiotic genes Nfyal, Npl, and Gh3.3 in wild-type L. japonicus (Gifu) or L. japonicus with mutations in epr3 and/or epr3a (labels below x-axis; epr3-11 single mutant, epr3a-1 single mutant, epr3a-2 single mutant, and epr3/epr3a double mutant). FIG. 18A shows qRT-PCR of the symbiotic gene Nfyal in wild-type L. japonicus (Gifu) or epr3-11 single mutant, epr3a-1 single mutant, epr3a-2 single mutant, and epr3/epr3a double mutant L. japonicus. FIG. 18B shows qRT-PCR of the symbiotic gene Npl in wild-type L. japonicus (Gifu) or epr3-11 single mutant, epr3a-1 single mutant, epr3a-2 single mutant, and epr3/epr3a double mutant L. japonicus. FIG. 18C shows qRT-PCR of the symbiotic gene Gh3.3 in wild-type L. japonicus (Gifu) or epr3-11 single mutant, epr3a-1 single mutant, epr3a-2 single mutant, and epr3/epr3a double mutant L. japonicus. In FIGS. 18A-18C, plants were treated with H₂O or M. loti strain R7A, and symbiotic gene expression was measured at 3 and 7 days post inoculation (dpi), as indicated on the x-axis. The y-axis represents the absolute expression of each transcript. The results represent the averages of three biological replicates with error bars indicating SEM.

[0091] FIGS. 19A-19B show models of symbiotic signaling output from the L. japonicus EPS receptors EPR3 and EPR3a in different genetic backgrounds (Gifu WT, epr3 single mutant, epr3a single mutant, epr3/epr3a double mutant). FIG. 19A shows a model of symbiotic signaling output from the L. japonicus EPS receptors in response to M. loti strain R7A wild-type EPS (large gray oval). FIG. 19B shows a model of symbiotic signaling output from the L. japonicus EPS receptors in response to M. loti strain R7AexoU truncated EPS (small gray oval). In FIGS. 19A-19B the relative strength of positive or negative symbiotic signaling in each of the plant genotypes is represented by the number of + or − symbols.

[0092] FIGS. 20A-20D show the phenotype of L. japonicus wild-type and epr-3 mutants when grown in natural soil. FIG. 20A shows shoot appearance after 7 weeks of growth in natural soil. Gifu represents wild-type L. japonicus, and all other plants are mutant in epr3 (epr3-11, epr3-10, and epr3-13). FIG. 20B shows shoot fresh weight (average and SEM are shown). The x-axis indicates the genotype of the plant (Gifu WT, epr3-11 mutant, epr3-10 mutant, and epr3-13 mutant) as well as the number of shoots measured in parentheses. The y-axis represents the shoot fresh weight of each plant in grams. FIG. 20C shows total nodule number (average and SEM are shown). The x-axis indicates the genotype of the plant (Gifu WT, epr3-11 mutant, epr3-10 mutant, and epr3-13 mutant) as well as the number of shoots measured in parentheses. The y-axis represents the total number of nodules per plant. FIG. 20D shows a schematic of the Epr3 gene with black boxes denoting the ten exons, dashed lines denoting the introns, and the positions of the start (labeled with ATG) and the end (labeled with TGA) as well as locations of the mutant alleles epr3-3, epr3-11, exo277 (epr3-10), epr3-12, epr3-13, and epr3-9 shown (from Kawaharada, Y et al. Nature 2015 523: 308-312).

[0093] FIGS. 21A-21D show α- and β-diversity analyses of L. japonicus wild-type (Gifu) and epr3-13 mutant microbiota. FIG. 21A shows Shannon indices of the diversity of bacteria in soil (dark gray), the rhizosphere (light gray), roots (gray), and nodules (black). The Shannon index of wild-type L. japonicus (Gifu) is shown as unfilled squares, the Shannon index of epr3-13 is shown as opaque circles, and soil is shown as Xs (box plots show the first quartile and third quartile with the line indicating the median). FIG. 21B shows a principal coordinates analysis (PCoA) plot of Bray-Curtis distances between samples from soil (dark gray), the rhizosphere (light gray), roots (gray), and nodules (black). L. japonicus (Gifu) is shown as opaque circles, epr3-13 mutant is shown as unfilled squares, and soil is shown as opaque triangles. The first principle component that explains 46.19% of the variance is plotted on the x-axis, and the second principle component that explains 20.17% of the variance is plotted on the y-axis. FIG. 21C shows a constrained PCoA plot of Bray-Curtis distances constrained by both genotype and compartment. Samples from the rhizosphere compartment are shown in lighter gray, and samples from roots are shown in gray. L. japonicus (Gifu) is shown as unfilled squares, epr3-13 mutant is shown as opaque circles. The figure shows microbiota dissimilarity (36.9% of variance explained by the two constrains, p<0.001, n=36). FIG. 21D shows a constrained PCoA plot of Bray-Curtis distances only constrained by genotype. Samples from the rhizosphere compartment are shown in lighter gray, and samples from roots are shown in gray. L. japonicus (Gifu) is shown as unfilled squares, epr3-13 is shown as opaque circles. In FIGS. 21B-21D the percentage in each axis indicates the fraction of total variance explained by projection.

[0094] FIGS. 22A-22B show the effects of mutations in Epr3 on the composition of the rhizosphere (FIG. 22A) and root (FIG. 22B) bacterial communities at distinct taxonomic level. FIG. 22A shows bacterial operational taxonomic units (OTUs) identified in the rhizosphere compartment grouped by taxa and arranged in Manhattan plots. FIG. 22B shows bacterial OTUs identified in the root compartment grouped by taxa and arranged in Manhattan plots. In FIGS. 22A-22B, OTUs are arranged on the x-axis, and the y-axis shows the significance of the difference in relative abundance of an OTU between L. japonicus wild-type and epr3-13 mutant plants (−log₁₀(p)). Each OTU is represented as a filled (statistically enriched in L. japonicus wild-type Gifu versus epr3-13) or empty (statistically not enriched in L. japonicus wild-type Gifu versus epr3-13) circle. The size of the circle is adjusted according to the relative abundance of the respective OTU in the analyzed compartment (see key at bottom of FIG. 22B). From left to right, the OTUs are grouped by the taxa Actinomycetales, Flavobacteriales, unknown, Caulobacterales, Rhizobiales, Rhodospirillales, Sphingomonadales, Burkholderiales, Pseudomonadales, and Xanthomonadales (labeled above the Manhattan plots).

[0095] FIGS. 23A-23D show the effect of Epr3 mutation on rhizosphere colonization of most abundant taxa. The average number of reads (FIGS. 23A-23B) and the relative abundance (FIGS. 23C-23D) of the top most abundant 100 OTUs identified in the rhizosphere compartment of wild-type L. japonicus Gifu are shown. FIG. 23A shows the average number of read counts for individual OTUs (column “OTUId”) of the taxa Betaproteobacteria and Burkholderiales in wild-type L. japonicus Gifu (column “G”) and epr3-13 (column “e”), represented as a heatmap (ranging from relatively higher read counts in dark gray, and relatively fewer read counts in light gray; key at bottom of FIG. 23B), the ratio between wild-type L. japonicus Gifu and epr3-13 average read count (column “G/e”), and the relative abundance (column “RA”) of the respective OTU in the indicated compartment of wild-type L. japonicus Gifu shown as horizontal bars. FIG. 23B shows the average number of read counts for individual OTUs (column “OTUId”) of the taxa Burkholderiales, Caulobacterales, Methylophilales, Pseudomonadales, Rhizobiales, Rhodospiralles, and Sphingomonadales in wild-type L. japonicus Gifu (column “G”) and epr3-13 (column “e”), represented as a heatmap (ranging from relatively higher read counts in dark gray, and relatively fewer read counts in light gray; key at bottom), the ratio between wild-type L. japonicus Gifu and epr3-13 average read count (column “G/e”), and the relative abundance (column “RA”) of the respective OTU in the indicated compartment of wild-type L. japonicus Gifu shown as horizontal bars. FIG. 23C shows the relative abundance of individual OTUs (column “OTUId”) grouped by taxa (column “Taxa”), order, and family (column “Family(f)/Order(o)”) in wild-type L. japonicus Gifu (column “G”) and epr3-13 (column “e”) represented as heatmap (ranging from relatively more abundant in light gray, and relatively less abundant in dark gray; key at bottom in FIG. 23D), and the relative abundance (column “RA”) of the respective OTU in wild-type L. japonicus Gifu, shown as horizontal bars (labeled dark gray if enriched in wild-type L. japonicus Gifu (p<0.05), labeled gray if enriched in epr3-13 (p<0.05), or labeled light gray if not significantly changed between the two genotypes). FIG. 23D shows the relative abundance of individual OTUs (column “OTUId”) grouped by taxa (column “Taxa”), order, and family (column “Family(f)/Order(o)”) in wild-type L. japonicus Gifu (column “G”) and epr3-13 (column “e”) represented as heatmap (ranging from relatively more abundant in light gray, and relatively less abundant in dark gray; key at bottom), and the relative abundance (column “RA”) of the respective OTU in wild-type L. japonicus Gifu, shown as horizontal bars (labeled dark gray if enriched in wild-type L. japonicus Gifu (p<0.05), labeled gray if enriched in epr3-13 (p<0.05), or labeled light gray if not significantly changed between the two genotypes).

[0096] FIG. 24 shows the effect of mutation of Epr3 on the abundance of Burkholderiales in the root compartment. Relative abundance of seven main phyla in the root compartment are arranged on the x-axis (in order: Actinomycetales, Burkholderiales, Caulobacteriales, Flavobacteriales, Rhizobiales, Sphingomonadales, and Xanthomonadales). On the y-axis, the relative abundance in the root for wild-type L. japonicus Gifu is shown in dark gray triangles, and the relative abundance in the root for epr3-13 is shown in light gray circles. The relative abundance of Burkholderiales is statistically decreased in the epr3-13 root, as indicated by the * label. Box plots show the first quartile and third quartile with the line indicating the median.

[0097] FIGS. 25A-25W show an alignment of the L. japonicus EPR3a polypeptide (EPR3A; SEQ ID NO: 62) and EPR3a-like polypeptide sequences from Prunus persica (XP_020410580_Prunus persica, SEQ ID NO: 63), Rosa chinensis (XP 024197374_Rosa chinensis, SEQ ID NO: 64), Vitis vinifera (RVW43308_Vitis vinifera, SEQ ID NO: 65), Ziziphus jujuba (XP_015894630_Ziziphus jujuba, SEQ ID NO: 66), Coffea arabica (XP_02 70993 33_Coffea arabica, SEQ ID NO: 67), Solanum pennellii (XP_015078544_Solanum pennellii, SEQ ID NO: 68), Solanum lycopersicum (XP_019069864_Solanum lycopersicum, SEQ ID NO: 69), Nicotiana attenuata (OIT29820_Nicotiana attenuata, SEQ ID NO: 70), Trema orientale (PON99018_Trema orientale, SEQ ID NO: 71), Trema levigatum (A5M47254_Trema levigatum, SEQ ID NO: 71), Juglans regia (XP_018805207_Juglans regia, SEQ ID NO: 72), Datisca glomerata (AZL41251_Datisca glomerata, SEQ ID NO: 73), Theobroma cacao (XP_017970654_Theobroma cacao, SEQ ID NO: 75), Durio zibethinus (XP_022775846_Durio zibethinus, SEQ ID NO: 76), Populus euphratica (XP_011034253_Populus euphratica, SEQ ID NO: 77; XP_011046250_Populus euphratica, SEQ ID NO: 90), Ricinus communis (XP_015580083_Ricinus communis, SEQ ID NO: 78), Manihot esculenta (OAY32540.1_Manihot esculenta, SEQ ID NO: 79), Daucus carota subsp. sativus (XP_017221830_Daucus carota subsp. sativus, SEQ ID NO: 80), Citrus sinensis (XP_006484322_Citrus sinensis, SEQ ID NO: 81), Citrus unshiu (GAY36258_Citrus unshiu, SEQ ID NO: 82), Vigna unguiculata (QCD82032 Vigna unguiculata, SEQ ID NO: 83), Vigna radiata var. radiata (XP_022632827 Vigna radiata var. radiata, SEQ ID NO: 84), Phaseolus vulgaris (XP 007153771_Phaseolus vulgaris, SEQ ID NO: 85), Glycine max (XP_003530632_Glycine max, SEQ ID NO: 86), Glycine soja (XP_028247343_Glycine soja, SEQ ID NO: 87), Lupinus angustifolius (XP_019423264 Lupinus angustifolius, SEQ ID NO: 88), Arachis ipaensis (XP_016192876_Arachis ipaensis, SEQ ID NO: 89), Zea mays (ZM8_Zea mays, SEQ ID NO: 91), and Hordeum vulgare (LysM-RLK8_Hordeum vulgare, SEQ ID NO: 92). Conservation is shown as black bars (scale: 0% to 100%) at the bottom of the alignment with similar residue shown with gray shading. FIG. 25A shows the first portion of the alignment. FIG. 25B shows the second portion of the alignment. FIG. 25C shows the third portion of the alignment. FIG. 25D shows the fourth portion of the alignment. FIG. 25E shows the fifth portion of the alignment. FIG. 25F shows the sixth portion of the alignment. FIG. 25G shows the seventh portion of the alignment. FIG. 25H shows the eighth portion of the alignment. FIG. 25I shows the ninth portion of the alignment. FIG. 25J shows the tenth portion of the alignment. FIG. 25K shows the eleventh portion of the alignment. FIG. 25L shows the twelfth portion of the alignment. FIG. 25M shows the thirteenth portion of the alignment. FIG. 25N shows the fourteenth portion of the alignment. FIG. 25O shows the fifteenth portion of the alignment. FIG. 25P shows the sixteenth portion of the alignment. FIG. 25Q shows the seventeenth portion of the alignment. FIG. 25R shows the eighteenth portion of the alignment. FIG. 25S shows the nineteenth portion of the alignment. FIG. 25T shows the twentieth portion of the alignment. FIG. 25U shows the twenty-first portion of the alignment. FIG. 25V shows the twenty-second portion of the alignment. FIG. 25W shows the twenty-third portion of the alignment.

[0098] FIGS. 26A-26L show an alignment of the L. japonicus EPR3 polypeptide (EPR3_Lj, SEQ ID NO: 61), the L. japonicus EPR3a polypeptide (EPR3A_Lj, SEQ ID NO: 62) and EPR3-like and EPR3a-like polypeptides from Lablab purpureus (Labpur_Labpu000468g0017.1, SEQ ID NO: 93; Labpur_Labpu000087g0009.1, SEQ ID NO: 108), Phaseolus vulgaris (Phavul_Phvul.002G059500.1, SEQ ID NO: 94; Phavul_Phvul.003G063700.1, SEQ ID NO: 107), Vigna unguiculata (Vigung_Vigun02g080500.1, SEQ ID NO: 95; Vigung_Vigun03g232900.1, SEQ ID NO: 105), Vigna subterranea (Vigsub_Vigsu002202g0039.1, SEQ ID NO: 96; Vigsub_Vigsul08716g0012.1, SEQ ID NO: 104), Vigna angularis (Vigang_vigan.Vang0057s00600.1, SEQ ID NO: 97; Vigang_vigan.Vang0033ss01040.1, SEQ ID NO: 109), Glycine max (Glymax_Glyma.01G027100.1, SEQ ID NO: 98; Glymax_Glyma.08G283300.1, SEQ ID NO: 110), Medicago truncatula (Medtru_MtrunA17_Chr5g0413071, SEQ ID NO: 99), Trifolium pratense (Tripra_Tp57577_TGAC_v2_mRNA40096, SEQ ID NO: 100), Castanospermum australe (Casaus_Castanospermum06838-PA, SEQ ID NO: 101), Nissolia schottii (Nissch_Nissc2308S18277, SEQ ID NO: 102; Nissch_Nissc255S07357, SEQ ID NO: 116), Cercis canadensis (Cercan_Cerca76S29361, SEQ ID NO: 103), Vigna radiata (Vigrad_Vradi0208s00120.1, SEQ ID NO: 106), Cajanus cajan (Cajcaj_Ccajan_03483, SEQ ID NO: 111), Arachis hypogaea (Arahyp_arahy.Tifrunner.gnm1.ann1.REE5L6.1, SEQ ID NO: 112; Arahyp_arahy.Tifrunner.gnm1.ann1.P7CPN3.1, SEQ ID NO: 113), Arachis ipaensis (Araipa_Araip.19T2H, SEQ ID NO: 114), Arachis duranensis (Aradur_Aradu.JOSGA, SEQ ID NO: 115), Lupinus angustifolius (Lupang_Lup020722.1, SEQ ID NO: 117), Faidherbia albida (Faialb_Faial00730g0027.1, SEQ ID NO: 118), Mimosa pudica (Mimpud_Mimpu35782S22845, SEQ ID NO: 119), Chamaecrista fasciculata (Chafas_Chafa3673S21651, SEQ ID NO: 120), and Prunus dulcis (Prudul_Prudul26A003177P1, SEQ ID NO: 121). The alignment is a CLUSTAL O(1.2.4) multiple sequence alignment, where an asterisk (*) indicates a fully conserved single residue, a colon (:) indicates conservation between residues with strongly similar properties (scoring >0.5 in the Gonnet PAM 250 matrix), and a period (.) indicates conservation between residues with weakly similar properties (scoring ≤0.5 in the Gonnet PAM 250 matrix). FIG. 26A shows the first portion of the alignment. FIG. 26B shows the second portion of the alignment. FIG. 26C shows the third portion of the alignment. FIG. 26D shows the fourth portion of the alignment. FIG. 26E shows the fifth portion of the alignment. FIG. 26F shows the sixth portion of the alignment. FIG. 26G shows the seventh portion of the alignment. FIG. 26H shows the eighth portion of the alignment. FIG. 26I shows the ninth portion of the alignment. FIG. 26J shows the tenth portion of the alignment. FIG. 26K shows the eleventh portion of the alignment. FIG. 26L shows the twelfth portion of the alignment.

[0099] FIGS. 27A-27L show an alignment of the L. japonicus EPR3 polypeptide (EPR3_Lj, SEQ ID NO: 61), and EPR3-like and EPR3a-like polypeptides from Prunus persica (Pruper_Prupe.1G247900.1, SEQ ID NO: 122), Prunus mume (Prumum_lcl_NC_024127.1_XP_016647040.1_6745, SEQ ID NO: 123), Rubus occidentalis (Rubocc_Bras_G02801, SEQ ID NO: 124), Theobroma cacao (Thecac_Thecc1EG010473t1, SEQ ID NO: 125), Gossypium raimondii (Gosrai_Gorai.005G179900.1, SEQ ID NO: 126), Sclerocarya birrea (Sclbir_Sclbi00092g0330.1, SEQ ID NO: 127), Ziziphus jujuba (Zizjuj_lcl_NC_029688.1_XP_015894630.2_26923, SEQ ID NO: 128), Discaria trinervis (Distri_Distr1293S13435, SEQ ID NO: 129), Trema orientalis (Treori_lcl_JXTC01000021.1_PON99018.1_5256, SEQ ID NO: 130), Parasponia andersonii (Parasponia_JXTB01000342.1_26365, SEQ ID NO: 131), Morus notabilis (Mornot_L484_027691, SEQ ID NO: 132), Citrus clementina (Citcle_Ciclev10033617m, SEQ ID NO: 133), Citrus sinensis (Citsin_orange 1.1g044997m, SEQ ID NO: 134), Datisca glomerata (Datglo_Datgl1333S01924, SEQ ID NO: 135), Manihot esculenta (Manesc_Manes.13G026000.1, SEQ ID NO: 136), Ricinus communis (Riccom_27504.m000627, SEQ ID NO: 137), Begoniafuchsioides (Begfuc_Begful064S15671, SEQ ID NO: 138), Alnus glutinosa (Alnglu_Alngl25086S21770, SEQ ID NO: 139), Casuarina glauca (Casgla_Casgl955S23425, SEQ ID NO: 140), Cajanus cajan (Cajcaj_Ccajan_12042, SEQ ID NO: 141), Fraxinus excelsior (Fraexc_FRAEX38873_v2_000332560.1, SEQ ID NO: 142), Solanum lycopersicum (Sollyc_Solyc06g069610.1.1, SEQ ID NO: 143), Solanum pennellii (Solpen_Sopen06g026910.1, SEQ ID NO: 144), Nicotiana benthamiana (Nicben_Niben101Scf02172g05003.1, SEQ ID NO: 145), Petunia axillaris (Petaxi_Peaxil62Scf00013g00053.1, SEQ ID NO: 146), Mimosa pudica (Mimpud_Mimpu5325S25442, SEQ ID NO: 147), Malus domestica (Maldom_MDP0000182108, SEQ ID NO: 148; Maldom_MDP0000137744, SEQ ID NO: 149), Pyrus communis (Pyrcom_PCP002145.1, SEQ ID NO: 150), and Pyrus x bretschneideri (Pyrbre_lcl_NW_008988137.1_XP_009363045.1_15483, SEQ ID NO: 151). The alignment is a CLUSTAL O(1.2.4) multiple sequence alignment, where an asterisk (*) indicates a fully conserved single residue, a colon (:) indicates conservation between residues with strongly similar properties (scoring >0.5 in the Gonnet PAM 250 matrix), and a period (.) indicates conservation between residues with weakly similar properties (scoring ≤0.5 in the Gonnet PAM 250 matrix). FIG. 27A shows the first portion of the alignment. FIG. 27B shows the second portion of the alignment. FIG. 27C shows the third portion of the alignment. FIG. 27D shows the fourth portion of the alignment. FIG. 27E shows the fifth portion of the alignment. FIG. 27F shows the sixth portion of the alignment. FIG. 27G shows the seventh portion of the alignment. FIG. 27H shows the eighth portion of the alignment. FIG. 27I shows the ninth portion of the alignment. FIG. 27J shows the tenth portion of the alignment. FIG. 27K shows the eleventh portion of the alignment. FIG. 27L shows the twelfth portion of the alignment.

[0100] FIGS. 28A-28M show an alignment of the L. japonicus EPR3 polypeptide (EPR3_Lj, SEQ ID NO: 61), and EPR3-like and EPR3a-like polypeptides from Prunus dulcis (Prudul_Prudul26A001224P1, SEQ ID NO: 152), Prunus persica (Pruper_Prupe.5G168000.1, SEQ ID NO: 153), Prunus mume (Prumum_lcl_NC_024132.1_XP_008239575.2_23116, SEQ ID NO: 154), Fragaria vesca (Fraves_FvH4_5g05950.1, SEQ ID NO: 155), Rubus occidentalis (Rubocc_Bras_G14455, SEQ ID NO: 156), Ziziphus jujuba (Zizjuj_lcl_NC_029683.1_XP_024929906.1_14394, SEQ ID NO: 157; Zizjuj_lcl_NC_029683.1_XP_024929890.1_14201; SEQ ID NO: 158), Populus trichocarpa (Poptri_Potri.015G082000.1, SEQ ID NO: 159), Sclerocarya birrea (Sclbir_Sclbi00184g0300.1, SEQ ID NO: 160), Manihot esculenta (Manesc_Manes.06G108500.1, SEQ ID NO: 161), Theobroma cacao (Thecac_Thecc1EG012192t1, SEQ ID NO: 162), Cucumis melo (Cucmel_MELO3C011965.2.1, SEQ ID NO: 163), Cucumis sativus (Cucsat_evm.model.Chr5.2205, SEQ ID NO: 164), Cucurbita pepo (Cucpep_Cp4.1LG01g15590.1, SEQ ID NO: 165), Cucurbita moschata (Cucmos_CmoCh04G018410.1, SEQ ID NO: 166), Helianthus annuus (Helann_HanXRQChr06g0174451, SEQ ID NO: 167; Helann_HanXRQChr05g0154581, SEQ ID NO: 168), Setaria italica (Setita Seita.5G192600.1, SEQ ID NO: 169), Sorghum bicolor (Sorbic_Sobic.003G184000.1, SEQ ID NO: 170), Zea mays (Zm00001d044536, SEQ ID NO: 171; Zm00001d009376, SEQ ID NO: 172), Brachypodium distachyon (Bradis_Bradi2g40627.1, SEQ ID NO: 173), Hordeum vulgare (Hv_RLK9, SEQ ID NO: 174), Oryza sativa (Orysat_LOC_Os01g36550.1, SEQ ID NO: 175), Musa acuminata (Musacu_GSMUA_AchrUn_randomP00190_001, SEQ ID NO: 176), Populus trichocarpa (Poptri_Potri.008G187500.2, SEQ ID NO: 177), Dendrobium catenatum (Dencat_lcl_NW_021394673.1_XP_020705880.2_31308, SEQ ID NO: 178), Apostasia shenzhenica (Aposhe_lcl_KZ451895.1_PKA65282.1_1767, SEQ ID NO: 179), Carica papaya (Carpap_evm.model.supercontig_33.2, SEQ ID NO: 180), and Quercus robur (Querob_Qrob_P0255210.2, SEQ ID NO: 181). The alignment is a CLUSTAL O(1.2.4) multiple sequence alignment, where an asterisk (*) indicates a fully conserved single residue, a colon (:) indicates conservation between residues with strongly similar properties (scoring >0.5 in the Gonnet PAM 250 matrix), and a period (.) indicates conservation between residues with weakly similar properties (scoring ≤0.5 in the Gonnet PAM 250 matrix). FIG. 28A shows the first portion of the alignment. FIG. 28B shows the second portion of the alignment. FIG. 28C shows the third portion of the alignment. FIG. 28D shows the fourth portion of the alignment. FIG. 28E shows the fifth portion of the alignment. FIG. 28F shows the sixth portion of the alignment. FIG. 28G shows the seventh portion of the alignment.

[0101] FIG. 28H shows the eighth portion of the alignment. FIG. 28I shows the ninth portion of the alignment. FIG. 28J shows the tenth portion of the alignment. FIG. 28K shows the eleventh portion of the alignment. FIG. 28L shows the twelfth portion of the alignment. FIG. 28M shows the thirteenth portion of the alignment.

[0102] FIGS. 29A-29D show comparisons of Epr3 and Epr3a genes, amino acid sequences, and protein structures across plant species. FIG. 29A shows a chart summarizing whether different plant have homologs of (from top to bottom) EPR3a or EPR3, and whether they form mutualistic associations with rhizobia (RNS), arbuscular mycorrhizal fungi (AMS), or ectomycorrhizal fungi (ECMS). The genus, species, or type of plant is indicated including, from left to right: Lotus, Medicago, Soybean, Parasponia, Trema, Populus, Malus, Fragaria, Maize, Rice, Wheat, Barley, Datisca, Lupinus, Arabidopsis, Brassica rapa, and Brassica napus. Filled-in boxes indicate that the plant does have a homolog of the indicated gene, empty boxes indicate that the plant does not have a homolog of the indicated gene, and the plus (+) and minus (−) signs indicate whether the plant does (+) or does not (−) form mutualistic associations with (from top to bottom) RNS, AMS, or ECMS. FIG. 29B shows an alignment of the amino acid sequences of the M1 domain of Lotus EPR3 (amino acid positions 54-98, top row) and EPR3a (amino acid positions 46-90, bottom row). The positions of the conserved secondary structures of the βαββ fold of the M1 domain are labeled (α1, β1, β2, and β3) above the alignment. FIG. 29C shows a predicted model of the structure of the L. japonicus EPR3a ED based on a homology model to the crystal structure of L. japonicus EPR3 (PDB code 6QUP). The positions of the M1, M2, and LysM3 domains are indicated, as well as the N- and C-termini. FIG. 29D shows a side-by-side comparison of a force field model of the structure of the M1 domain of L. japonicus EPR3a (top) with a crystal structure of the M1 domain of L. japonicus EPR3 (bottom, PDB code 6QUP). In both structures, the β-sheets and α-helix secondary structures that make up the βαββ fold of the M1 domain are labeled (α 1, β1, β2, and β3), and the position of the N- and C-termini are indicated.

[0103] FIGS. 30A-30B show analyses of the expression of EPR3a and EPR3. FIG. 30A shows qRT-PCR data showing expression of PT4 (top), Epr3a (center), and Epr3 (bottom) in L. japonicus during the establishment of symbiosis with arbuscular mycorrhizae. For each transcript, the number of days post inoculation (dpi) is shown on the x-axis, and the level of absolute expression is shown on the y-axis. The expression level of each transcript is shown under inoculation with arbuscular mycorrhizae (shaded box-and-whisker plots), and under a mock inoculation (white box-and-whisker plots). Results shown are from three biological replicates. Box plots show the first quartile and third quartile with the line indicating the median. FIG. 30B shows Epr3a promoter activity in roots during arbuscular mycorrhizal colonization. The Epr3a promoter was placed upstream of the marker GUS, and blue staining (seen as dark patches; indicated by arrows labeled “Epr3a promoter activity”) indicates GUS activity. Green fluorescence (seen as white structures; indicated by arrows labeled “Fungal structure”) indicates fungal (arbuscular mycorrhizae) structures.

[0104] FIG. 31 shows phenotypes of wild type L. japonicus Gifu (Gifu) compared to phenotypes of L. japonicus with mutations in epr3 and/or epr3a when inoculated with arbuscular mycorrhizae, 6 weeks post inoculation. The x-axis indicates the genotype of the plant (Gifu WT, epr3-11 single mutant, epr3a-1 single mutant, epr3a-2 single mutant, and epr3/epr3a double mutant) and the y-axis indicates the % occurrence of the presence of fungal infection (left box-and-whisker for each genotype, dark gray), arbuscules (center box- and whisker for each genotype, gray), and vesicles (right box-and-whisker for each genotype, light gray). Box plots show the first quartile and third quartile with the line indicating the median. Statistical comparisons between genotypes for each infection event are shown using ANOVA and Tukey post hoc testing with p-values (<0.05), as indicated by different letters, and the sample size for each genotype is indicated beneath the x-axis (n).

[0105] FIG. 32 shows expression of the M. truncatula A17 EPR3/EPR3a-like gene MtrunA17_Chr5g0413071 (Lyk10) during arbuscular mycorrhizal symbiosis. The number of days post inoculation (dpi) is shown on the x-axis, and the normalized number of counts from the MtrunA17_Chr5g0413071 transcript is shown on the y-axis. The expression level is shown under inoculation with arbuscular mycorrhizae (left bar for each number of days post infection), and under a mock inoculation (right bar for each number of days post infection). The expression data shown in FIG. 32 is RNA-seq data from (Gobbato, E. et al., Curr Biol 2012 22(23):2236-41) that was mined and analyzed. Error bars indicate standard error of the mean.

[0106] FIGS. 33A-33B show models of symbiotic signaling output from the L. japonicus EPS receptors EPR3 and EPR3a. FIG. 33A shows a model of symbiotic signaling output from the L. japonicus EPS receptors EPR3 and EPR3a in root nodule symbioses with bacteria (RNS). FIG. 33B shows a model of symbiotic signaling output from the L. japonicus EPS receptors EPR3 and EPR3a in arbuscular mycorrhizal symbioses with fungi (AMS). In FIGS. 33A-33B, EPR3 is shown at left, EPR3a is shown at right, and the relative strength of positive symbiotic signaling in each type of symbiosis is represented by the number of + symbols (increased number=increased relative strength).

[0107] FIGS. 34A-34B show the relative abundance of bacterial colonization of wild-type L. japonicus Gifu (Gifu) compared to L. japonicus with mutations in epr3 and/or epr3a. Plants were co-inoculated with the symbiotic bacteria M. loti R7A exoU, and non-symbiotic isolates of Burkholderiales bacteria. FIG. 34A shows the relative abundance of bacterial colonization of L. japonicus Gifu (Gifu) compared to L. japonicus with mutations in epr3 and/or epr3a with M. loti R7A exoU (R7AexoU) and total Burkholderiales (total Burk), representing the value of total Burkholderiales calculated based on the relative abundance of all Burkholderiales isolates used in this experiment (Burkholderiales isolates LjRoot223, LjRoot280, LjRoot194, LjRoot230, LjRoot241, LjRoot70, LjRoot29, LjRoot1, LjRoot131, LjRoot296, LjRoot122, LjRoot39, LjRoot294). FIG. 34B shows the relative abundance of bacterial colonization of L. japonicus Gifu (Gifu) compared to L. japonicus with mutations in epr3 and/or epr3a with the bacteria measured including, from left to right on the x-axis, Burkholderiales isolates LjRoot223, LjRoot280, LjRoot194, LjRoot230, LjRoot241, and LjRoot70. In FIGS. 34A-34B, the y-axis indicates the relative abundance of each type of bacteria as a percentage. For each type of bacteria, abundance is shown as a boxplot for, from left to right, wild-type L. japonicus (Gifu), epr3a-1 (e3a-1), epr3a-2 (e3a-2), or the epr3/epr3a double mutant (DM) plants. In each boxplot, the line indicates the median value, and the edges of the box illustrate the first and third quartile. Dots represent values from individual plants.

### DETAILED DESCRIPTION

[0108] The following description sets forth exemplary methods, parameters, and the like. It should be recognized, however, that such description is not intended as a limitation on the scope of the present disclosure but is instead provided as a description of exemplary embodiments.

### Genetically Altered Plants

[0109] An aspect of the disclosure includes a genetically altered plant or part thereof including a first nucleic acid sequence encoding a heterologous EPR3 or EPR3-like polypeptide or a modified EPR3 or EPR3-like polypeptide, wherein the heterologous EPR3 or EPR3-like polypeptide or the modified EPR3 or EPR3-like polypeptide provides increased selectivity for a beneficial commensal microbe as compared to a wild-type plant under the same conditions. Selectivity may mean positive selection of the beneficial commensal microbe, negative selection of other microbes that are not the beneficial commensal, or a combination thereof. An additional embodiment of this aspect includes the plant or part thereof further including a second nucleic acid sequence encoding a heterologous EPR3a or EPR3a-like polypeptide or a modified EPR3a or EPR3a-like polypeptide. In a further embodiment of this aspect, which may be combined with any of the preceding embodiments, the heterologous EPR3 or EPR3-like polypeptide is selected from the group of a first polypeptide with at least 70% sequence identity, at least 71% sequence identity, at least 72% sequence identity, at least 73% sequence identity, at least 74% sequence identity, at least 75% sequence identity, at least 76% sequence identity, at least 77% sequence identity, at least 78% sequence identity, at least 79% sequence identity, at least 80% sequence identity, at least 81% sequence identity, at least 82% sequence identity, at least 83% sequence identity, at least 84% sequence identity, at least 85% sequence identity, at least 86% sequence identity, at least 87% sequence identity, at least 88% sequence identity, at least 89% sequence identity, at least 90% sequence identity, at least 91% sequence identity, at least 92% sequence identity, at least 93% sequence identity, at least 94% sequence identity, at least 95% sequence identity, at least 96% sequence identity, at least 97% sequence identity, at least 98% sequence identity, or at least 99% sequence identity to SEQ ID NO: 1 [L. japonicus (BAI79269.1)], a second polypeptide with at least 70% sequence identity, at least 71% sequence identity, at least 72% sequence identity, at least 73% sequence identity, at least 74% sequence identity, at least 75% sequence identity, at least 76% sequence identity, at least 77% sequence identity, at least 78% sequence identity, at least 79% sequence identity, at least 80% sequence identity, at least 81% sequence identity, at least 82% sequence identity, at least 83% sequence identity, at least 84% sequence identity, at least 85% sequence identity, at least 86% sequence identity, at least 87% sequence identity, at least 88% sequence identity, at least 89% sequence identity, at least 90% sequence identity, at least 91% sequence identity, at least 92% sequence identity, at least 93% sequence identity, at least 94% sequence identity, at least 95% sequence identity, at least 96% sequence identity, at least 97% sequence identity, at least 98% sequence identity, or at least 99% sequence identity to SEQ ID NO: 2 [Chickpea (XP_004489790.1)], a third polypeptide with at least 70% sequence identity, at least 71% sequence identity, at least 72% sequence identity, at least 73% sequence identity, at least 74% sequence identity, at least 75% sequence identity, at least 76% sequence identity, at least 77% sequence identity, at least 78% sequence identity, at least 79% sequence identity, at least 80% sequence identity, at least 81% sequence identity, at least 82% sequence identity, at least 83% sequence identity, at least 84% sequence identity, at least 85% sequence identity, at least 86% sequence identity, at least 87% sequence identity, at least 88% sequence identity, at least 89% sequence identity, at least 90% sequence identity, at least 91% sequence identity, at least 92% sequence identity, at least 93% sequence identity, at least 94% sequence identity, at least 95% sequence identity, at least 96% sequence identity, at least 97% sequence identity, at least 98% sequence identity, or at least 99% sequence identity to SEQ ID NO: 3 [Medicago (XP_003613165.1)], a fourth polypeptide with at least 70% sequence identity, at least 71% sequence identity, at least 72% sequence identity, at least 73% sequence identity, at least 74% sequence identity, at least 75% sequence identity, at least 76% sequence identity, at least 77% sequence identity, at least 78% sequence identity, at least 79% sequence identity, at least 80% sequence identity, at least 81% sequence identity, at least 82% sequence identity, at least 83% sequence identity, at least 84% sequence identity, at least 85% sequence identity, at least 86% sequence identity, at least 87% sequence identity, at least 88% sequence identity, at least 89% sequence identity, at least 90% sequence identity, at least 91% sequence identity, at least 92% sequence identity, at least 93% sequence identity, at least 94% sequence identity, at least 95% sequence identity, at least 96% sequence identity, at least 97% sequence identity, at least 98% sequence identity, or at least 99% sequence identity to SEQ ID NO: 4 [Soybean (XP_003517716.1)], a fifth polypeptide with at least 70% sequence identity, at least 71% sequence identity, at least 72% sequence identity, at least 73% sequence identity, at least 74% sequence identity, at least 75% sequence identity, at least 76% sequence identity, at least 77% sequence identity, at least 78% sequence identity, at least 79% sequence identity, at least 80% sequence identity, at least 81% sequence identity, at least 82% sequence identity, at least 83% sequence identity, at least 84% sequence identity, at least 85% sequence identity, at least 86% sequence identity, at least 87% sequence identity, at least 88% sequence identity, at least 89% sequence identity, at least 90% sequence identity, at least 91% sequence identity, at least 92% sequence identity, at least 93% sequence identity, at least 94% sequence identity, at least 95% sequence identity, at least 96% sequence identity, at least 97% sequence identity, at least 98% sequence identity, or at least 99% sequence identity to SEQ ID NO: 5 [Phaseolus (XP_007157313.1)], a sixth polypeptide with at least 70% sequence identity, at least 71% sequence identity, at least 72% sequence identity, at least 73% sequence identity, at least 74% sequence identity, at least 75% sequence identity, at least 76% sequence identity, at least 77% sequence identity, at least 78% sequence identity, at least 79% sequence identity, at least 80% sequence identity, at least 81% sequence identity, at least 82% sequence identity, at least 83% sequence identity, at least 84% sequence identity, at least 85% sequence identity, at least 86% sequence identity, at least 87% sequence identity, at least 88% sequence identity, at least 89% sequence identity, at least 90% sequence identity, at least 91% sequence identity, at least 92% sequence identity, at least 93% sequence identity, at least 94% sequence identity, at least 95% sequence identity, at least 96% sequence identity, at least 97% sequence identity, at least 98% sequence identity, or at least 99% sequence identity to SEQ ID NO: 6 [Populus (XP_002322185.1)], a seventh polypeptide with at least 70% sequence identity, at least 71% sequence identity, at least 72% sequence identity, at least 73% sequence identity, at least 74% sequence identity, at least 75% sequence identity, at least 76% sequence identity, at least 77% sequence identity, at least 78% sequence identity, at least 79% sequence identity, at least 80% sequence identity, at least 81% sequence identity, at least 82% sequence identity, at least 83% sequence identity, at least 84% sequence identity, at least 85% sequence identity, at least 86% sequence identity, at least 87% sequence identity, at least 88% sequence identity, at least 89% sequence identity, at least 90% sequence identity, at least 91% sequence identity, at least 92% sequence identity, at least 93% sequence identity, at least 94% sequence identity, at least 95% sequence identity, at least 96% sequence identity, at least 97% sequence identity, at least 98% sequence identity, or at least 99% sequence identity to SEQ ID NO: 7 [Mains (XP_008340354.1)], an eighth polypeptide with at least 70% sequence identity, at least 71% sequence identity, at least 72% sequence identity, at least 73% sequence identity, at least 74% sequence identity, at least 75% sequence identity, at least 76% sequence identity, at least 77% sequence identity, at least 78% sequence identity, at least 79% sequence identity, at least 80% sequence identity, at least 81% sequence identity, at least 82% sequence identity, at least 83% sequence identity, at least 84% sequence identity, at least 85% sequence identity, at least 86% sequence identity, at least 87% sequence identity, at least 88% sequence identity, at least 89% sequence identity, at least 90% sequence identity, at least 91% sequence identity, at least 92% sequence identity, at least 93% sequence identity, at least 94% sequence identity, at least 95% sequence identity, at least 96% sequence identity, at least 97% sequence identity, at least 98% sequence identity, or at least 99% sequence identity to SEQ ID NO: 8 [Vitis (XP_002272814.2)], a ninth polypeptide with at least 70% sequence identity, at least 71% sequence identity, at least 72% sequence identity, at least 73% sequence identity, at least 74% sequence identity, at least 75% sequence identity, at least 76% sequence identity, at least 77% sequence identity, at least 78% sequence identity, at least 79% sequence identity, at least 80% sequence identity, at least 81% sequence identity, at least 82% sequence identity, at least 83% sequence identity, at least 84% sequence identity, at least 85% sequence identity, at least 86% sequence identity, at least 87% sequence identity, at least 88% sequence identity, at least 89% sequence identity, at least 90% sequence identity, at least 91% sequence identity, at least 92% sequence identity, at least 93% sequence identity, at least 94% sequence identity, at least 95% sequence identity, at least 96% sequence identity, at least 97% sequence identity, at least 98% sequence identity, or at least 99% sequence identity to SEQ ID NO: 9 [Theobroma (XP_007036352.1)], a tenth polypeptide with at least 70% sequence identity, at least 71% sequence identity, at least 72% sequence identity, at least 73% sequence identity, at least 74% sequence identity, at least 75% sequence identity, at least 76% sequence identity, at least 77% sequence identity, at least 78% sequence identity, at least 79% sequence identity, at least 80% sequence identity, at least 81% sequence identity, at least 82% sequence identity, at least 83% sequence identity, at least 84% sequence identity, at least 85% sequence identity, at least 86% sequence identity, at least 87% sequence identity, at least 88% sequence identity, at least 89% sequence identity, at least 90% sequence identity, at least 91% sequence identity, at least 92% sequence identity, at least 93% sequence identity, at least 94% sequence identity, at least 95% sequence identity, at least 96% sequence identity, at least 97% sequence identity, at least 98% sequence identity, or at least 99% sequence identity to SEQ ID NO: 10 [Ricinus (XP_002527912.1)], an eleventh polypeptide with at least 70% sequence identity, at least 71% sequence identity, at least 72% sequence identity, at least 73% sequence identity, at least 74% sequence identity, at least 75% sequence identity, at least 76% sequence identity, at least 77% sequence identity, at least 78% sequence identity, at least 79% sequence identity, at least 80% sequence identity, at least 81% sequence identity, at least 82% sequence identity, at least 83% sequence identity, at least 84% sequence identity, at least 85% sequence identity, at least 86% sequence identity, at least 87% sequence identity, at least 88% sequence identity, at least 89% sequence identity, at least 90% sequence identity, at least 91% sequence identity, at least 92% sequence identity, at least 93% sequence identity, at least 94% sequence identity, at least 95% sequence identity, at least 96% sequence identity, at least 97% sequence identity, at least 98% sequence identity, or at least 99% sequence identity to SEQ ID NO: 11 [Fragaria (XP_004300916.1)], a twelfth polypeptide with at least 70% sequence identity, at least 71% sequence identity, at least 72% sequence identity, at least 73% sequence identity, at least 74% sequence identity, at least 75% sequence identity, at least 76% sequence identity, at least 77% sequence identity, at least 78% sequence identity, at least 79% sequence identity, at least 80% sequence identity, at least 81% sequence identity, at least 82% sequence identity, at least 83% sequence identity, at least 84% sequence identity, at least 85% sequence identity, at least 86% sequence identity, at least 87% sequence identity, at least 88% sequence identity, at least 89% sequence identity, at least 90% sequence identity, at least 91% sequence identity, at least 92% sequence identity, at least 93% sequence identity, at least 94% sequence identity, at least 95% sequence identity, at least 96% sequence identity, at least 97% sequence identity, at least 98% sequence identity, or at least 99% sequence identity to SEQ ID NO: 12 [Maize (XP_008657477.1)], a thirteenth polypeptide with at least 70% sequence identity, at least 71% sequence identity, at least 72% sequence identity, at least 73% sequence identity, at least 74% sequence identity, at least 75% sequence identity, at least 76% sequence identity, at least 77% sequence identity, at least 78% sequence identity, at least 79% sequence identity, at least 80% sequence identity, at least 81% sequence identity, at least 82% sequence identity, at least 83% sequence identity, at least 84% sequence identity, at least 85% sequence identity, at least 86% sequence identity, at least 87% sequence identity, at least 88% sequence identity, at least 89% sequence identity, at least 90% sequence identity, at least 91% sequence identity, at least 92% sequence identity, at least 93% sequence identity, at least 94% sequence identity, at least 95% sequence identity, at least 96% sequence identity, at least 97% sequence identity, at least 98% sequence identity, or at least 99% sequence identity to SEQ ID NO: 13 [Rice (XP_015628733.1)], a fourteenth polypeptide with at least 70% sequence identity, at least 71% sequence identity, at least 72% sequence identity, at least 73% sequence identity, at least 74% sequence identity, at least 75% sequence identity, at least 76% sequence identity, at least 77% sequence identity, at least 78% sequence identity, at least 79% sequence identity, at least 80% sequence identity, at least 81% sequence identity, at least 82% sequence identity, at least 83% sequence identity, at least 84% sequence identity, at least 85% sequence identity, at least 86% sequence identity, at least 87% sequence identity, at least 88% sequence identity, at least 89% sequence identity, at least 90% sequence identity, at least 91% sequence identity, at least 92% sequence identity, at least 93% sequence identity, at least 94% sequence identity, at least 95% sequence identity, at least 96% sequence identity, at least 97% sequence identity, at least 98% sequence identity, or at least 99% sequence identity to SEQ ID NO: 14 [Wheat (CDM80098.1)], or a fifteenth polypeptide with at least 70% sequence identity, at least 71% sequence identity, at least 72% sequence identity, at least 73% sequence identity, at least 74% sequence identity, at least 75% sequence identity, at least 76% sequence identity, at least 77% sequence identity, at least 78% sequence identity, at least 79% sequence identity, at least 80% sequence identity, at least 81% sequence identity, at least 82% sequence identity, at least 83% sequence identity, at least 84% sequence identity, at least 85% sequence identity, at least 86% sequence identity, at least 87% sequence identity, at least 88% sequence identity, at least 89% sequence identity, at least 90% sequence identity, at least 91% sequence identity, at least 92% sequence identity, at least 93% sequence identity, at least 94% sequence identity, at least 95% sequence identity, at least 96% sequence identity, at least 97% sequence identity, at least 98% sequence identity, or at least 99% sequence identity to SEQ ID NO: 15 [Barley (MLOC_5489.2)]. Yet another embodiment of this aspect includes the heterologous EPR3 or EPR3-like polypeptide being selected from the group of SEQ ID NO: 1 [L. japonicus (EPR3)], SEQ ID NO: 2 [Chickpea (XP_004489790.1)], SEQ ID NO: 3 [Medicago (XP_003613165.1)], SEQ ID NO: 4 [Soybean (XP_003517716.1)], SEQ ID NO: 5 [Phaseolus (XP_007157313.1)], SEQ ID NO: 6 [Populus (XP_002322185.1)], SEQ ID NO: 7 [Malus (XP_008340354.1)], SEQ ID NO: 8 [Vitis (XP_002272814.2)], SEQ ID NO: 9 [Theobroma (XP_007036352.1)], SEQ ID NO: 10 [Ricinus (XP_002527912.1)], SEQ ID NO: 11 [Fragaria (XP_004300916.1)], SEQ ID NO: 12 [Maize (XP_008657477.1)], SEQ ID NO: 13 [Rice (XP_015628733.1)], SEQ ID NO: 14 [Wheat (CDM80098.1)], or SEQ ID NO: 15 [Barley (MLOC_5489.2)]. Still another embodiment of this aspect, which may be combined with any of the preceding embodiments that has a heterologous EPR3a or EPR3a-like polypeptide, the heterologous EPR3a or EPR3a-like polypeptide is selected from the group of a polypeptide with at least 70% sequence identity, at least 71% sequence identity, at least 72% sequence identity, at least 73% sequence identity, at least 74% sequence identity, at least 75% sequence identity, at least 76% sequence identity, at least 77% sequence identity, at least 78% sequence identity, at least 79% sequence identity, at least 80% sequence identity, at least 81% sequence identity, at least 82% sequence identity, at least 83% sequence identity, at least 84% sequence identity, at least 85% sequence identity, at least 86% sequence identity, at least 87% sequence identity, at least 88% sequence identity, at least 89% sequence identity, at least 90% sequence identity, at least 91% sequence identity, at least 92% sequence identity, at least 93% sequence identity, at least 94% sequence identity, at least 95% sequence identity, at least 96% sequence identity, at least 97% sequence identity, at least 98% sequence identity, or at least 99% sequence identity to SEQ ID NO: 62 [L. japonicus (EPR3a)], SEQ ID NO: 63, SEQ ID NO: 64, SEQ ID NO: 65, SEQ ID NO: 66, SEQ ID NO: 67, SEQ ID NO: 68, SEQ ID NO: 69, SEQ ID NO: 70, SEQ ID NO: 71, SEQ ID NO: 72, SEQ ID NO: 73, SEQ ID NO: 74, SEQ ID NO: 75, SEQ ID NO: 76, SEQ ID NO: 77, SEQ ID NO: 78, SEQ ID NO: 79, SEQ ID NO: 80, SEQ ID NO: 81, SEQ ID NO: 82, SEQ ID NO: 83, SEQ ID NO: 84, SEQ ID NO: 85, SEQ ID NO: 86, SEQ ID NO: 87, SEQ ID NO: 88, SEQ ID NO: 89, SEQ ID NO: 90, SEQ ID NO: 91, or SEQ ID NO: 92. A further embodiment of this aspect includes the heterologous EPR3a or EPR3a-like polypeptide being SEQ ID NO: 62 [L. japonicus (EPR3a)], SEQ ID NO: 63, SEQ ID NO: 64, SEQ ID NO: 65, SEQ ID NO: 66, SEQ ID NO: 67, SEQ ID NO: 68, SEQ ID NO: 69, SEQ ID NO: 70, SEQ ID NO: 71, SEQ ID NO: 72, SEQ ID NO: 73, SEQ ID NO: 74, SEQ ID NO: 75, SEQ ID NO: 76, SEQ ID NO: 77, SEQ ID NO: 78, SEQ ID NO: 79, SEQ ID NO: 80, SEQ ID NO: 81, SEQ ID NO: 82, SEQ ID NO: 83, SEQ ID NO: 84, SEQ ID NO: 85, SEQ ID NO: 86, SEQ ID NO: 87, SEQ ID NO: 88, SEQ ID NO: 89, SEQ ID NO: 90, SEQ ID NO: 91, or SEQ ID NO: 92.

[0110] Still another embodiment of this aspect, which may be combined with any of the preceding embodiments, the modified EPR3 or EPR3-like polypeptide comprises a modified ectodomain that has been replaced with all or a portion of an ectodomain of the heterologous EPR3 or EPR3-like polypeptide, optionally all or a part of the M1 domain, the M2 domain, the LysM3 domain, or all three. In an additional embodiment of this aspect, the portion replaced is at least 10%, at least 11%, at least 12%, at least 13%, at least 14%, at least 15%, at least 16%, at least 17%, at least 18%, at least 19%, at least 20%, at least 21%, at least 22%, at least 23%, at least 24%, at least 25%, at least 26%, at least 27%, at least 28%, at least 29%, at least 30%, at least 31%, at least 32%, at least 33%, at least 34%, at least 35%, at least 36%, at least 37%, at least 38%, at least 39%, at least 40%, at least 41%, at least 42%, at least 43%, at least 44%, at least 45%, at least 46%, at least 47%, at least 48%, at least 49%, at least 50%, at least 51%, at least 52%, at least 53%, at least 54%, at least 55%, at least 56%, at least 57%, at least 58%, at least 59%, at least 60%, at least 61%, at least 62%, at least 63%, at least 64%, at least 65%, at least 66%, at least 67%, at least 68%, at least 69%, at least 70%, at least 71%, at least 72%, at least 73%, at least 74%, at least 75%, at least 76%, at least 77%, at least 78%, at least 79%, at least 80%, at least 81%, at least 82%, at least 83%, at least 84%, at least 85%, at least 86%, at least 87%, at least 88%, at least 89%, at least 90%, less than 10%, less than 11%, less than 12%, less than 13%, less than 14%, less than 15%, less than 16%, less than 17%, less than 18%, less than 19%, less than 20%, less than 21%, less than 22%, less than 23%, less than 24%, less than 25%, less than 26%, less than 27%, less than 28%, less than 29%, less than 30%, less than 31%, less than 32%, less than 33%, less than 34%, less than 35%, less than 36%, less than 37%, less than 38%, less than 39%, less than 40%, less than 41%, less than 42%, less than 43%, less than 44%, less than 45%, less than 46%, less than 47%, less than 48%, less than 49%, less than 50%, less than 51%, less than 52%, less than 53%, less than 54%, less than 55%, less than 56%, less than 57%, less than 58%, less than 59%, less than 60%, less than 61%, less than 62%, less than 63%, less than 64%, less than 65%, less than 66%, less than 67%, less than 68%, less than 69%, less than 70%, less than 71%, less than 72%, less than 73%, less than 74%, less than 75%, less than 76%, less than 77%, less than 78%, less than 79%, less than 80%, less than 81%, less than 82%, less than 83%, less than 84%, less than 85%, less than 86%, less than 87%, less than 88%, less than 89%, or less than 90%, of the ectodomain or, optionally all or a part of the M1 domain, the M2 domain, the LysM3 domain, or all three. In yet another embodiment of this aspect, which may be combined with any of the preceding embodiments that have an EPR3a or EPR3a-like polypeptide, the modified EPR3a or EPR3a-like polypeptide includes a modified ectodomain that has been replaced with all or a portion of an ectodomain of the heterologous EPR3a or EPR3a-like polypeptide, optionally all or a part of the M1 domain, the M2 domain, the LysM3 domain, or all three. In an additional embodiment of this aspect, the portion replaced is at least 10%, at least 11%, at least 12%, at least 13%, at least 14%, at least 15%, at least 16%, at least 17%, at least 18%, at least 19%, at least 20%, at least 21%, at least 22%, at least 23%, at least 24%, at least 25%, at least 26%, at least 27%, at least 28%, at least 29%, at least 30%, at least 31%, at least 32%, at least 33%, at least 34%, at least 35%, at least 36%, at least 37%, at least 38%, at least 39%, at least 40%, at least 41%, at least 42%, at least 43%, at least 44%, at least 45%, at least 46%, at least 47%, at least 48%, at least 49%, at least 50%, at least 51%, at least 52%, at least 53%, at least 54%, at least 55%, at least 56%, at least 57%, at least 58%, at least 59%, at least 60%, at least 61%, at least 62%, at least 63%, at least 64%, at least 65%, at least 66%, at least 67%, at least 68%, at least 69%, at least 70%, at least 71%, at least 72%, at least 73%, at least 74%, at least 75%, at least 76%, at least 77%, at least 78%, at least 79%, at least 80%, at least 81%, at least 82%, at least 83%, at least 84%, at least 85%, at least 86%, at least 87%, at least 88%, at least 89%, at least 90%, less than 10%, less than 11%, less than 12%, less than 13%, less than 14%, less than 15%, less than 16%, less than 17%, less than 18%, less than 19%, less than 20%, less than 21%, less than 22%, less than 23%, less than 24%, less than 25%, less than 26%, less than 27%, less than 28%, less than 29%, less than 30%, less than 31%, less than 32%, less than 33%, less than 34%, less than 35%, less than 36%, less than 37%, less than 38%, less than 39%, less than 40%, less than 41%, less than 42%, less than 43%, less than 44%, less than 45%, less than 46%, less than 47%, less than 48%, less than 49%, less than 50%, less than 51%, less than 52%, less than 53%, less than 54%, less than 55%, less than 56%, less than 57%, less than 58%, less than 59%, less than 60%, less than 61%, less than 62%, less than 63%, less than 64%, less than 65%, less than 66%, less than 67%, less than 68%, less than 69%, less than 70%, less than 71%, less than 72%, less than 73%, less than 74%, less than 75%, less than 76%, less than 77%, less than 78%, less than 79%, less than 80%, less than 81%, less than 82%, less than 83%, less than 84%, less than 85%, less than 86%, less than 87%, less than 88%, less than 89%, or less than 90%, of the ectodomain or, optionally all or a part of the M1 domain, the M2 domain, the LysM3 domain, or all three. A further embodiment of this aspect, which may be combined with any of the preceding embodiments that have an EPR3a or EPR3a-like polypeptide, includes the heterologous EPR3 or EPR3-like polypeptide and the heterologous EPR3a or EPR3a-like polypeptide being from the same plant species or the same plant variety.

[0111] Yet another embodiment of this aspect, which may be combined with any of the preceding embodiments, includes the expression of the heterologous EPR3 or EPR3-like polypeptide or the modified EPR3 or EPR3-like polypeptide allowing the plant or part thereof to recognize an EPS, a beta-glucan, a cyclic beta-glucan, a LPS, or a surface carbohydrate produced by the microbe. Still another embodiment of this aspect, which may be combined with any of the preceding embodiments that have an EPR3a or EPR3a-like polypeptide, includes the expression of the heterologous EPR3a or EPR3a-like polypeptide or the modified EPR3a or EPR3a-like polypeptide allowing the plant or part thereof to recognize an EPS, a beta-glucan, a cyclic beta-glucan, a LPS, or a surface carbohydrate produced by the microbe. In a further embodiment of this aspect, the expression of the heterologous EPR3 or EPR3-like polypeptide or the modified EPR3 or EPR3-like polypeptide and the expression of the heterologous EPR3a or EPR3a-like polypeptide or the modified EPR3a or EPR3a-like polypeptide allows the plant or part thereof to recognize an EPS, a beta-glucan, a cyclic beta-glucan, a LPS, or a surface carbohydrate produced by the microbe. In an additional embodiment of this aspect that can be combined with any preceding embodiments including an EPS produced by the microbe, the microbe is a commensal bacteria, optionally a nitrogen-fixing bacteria, or a mycorrhizal fungi. A further embodiment of this aspect includes the nitrogen-fixing bacteria being selected from the group of Mesorhizobium loti, Mesorhizobium huakuii, Mesorhizobium mediterraneum, Mesorhizobium ciceri, Mesorhizobium spp., Rhizobium mongolense, Rhizobium tropici, Rhizobium etli phaseoli, Rhizobium giardinii, Rhizobium leguminosarum optionally R. leguminosarum trifolii, R. leguminosarum viciae, and R. leguminosarum phaseoli, Burkholderiales optionally symbionts of Mimosa, Sinorhizobium meliloti, Sinorhizobium medicae, Sinorhizobium fredii, Sinorhizobium fredii NGR234, Azorhizobium caulinodans, Bradyrhizobium japonicum, Bradyrhizobium elkanii, Bradyrhizobium liaonginense, Rhizobium spp., Mesorhizobium spp., Sinorhizobium spp., Azorhizobium spp. Frankia spp., or any combination thereof, or the mycorrhizal fungi being selected from the group of Acaulosporaceae spp., Diversisporaceae spp., Gigasporaceae spp., Pacisporaceae spp., Funneliformis spp., Glomus spp., Rhizophagus spp., Sclerocystis spp., Septoglomus spp., Claroideoglomus spp., Ambispora spp., Archaeospora spp., Geosiphon pyriformis, Paraglomus spp., other species in the division Glomeromycota, or any combination thereof. Still another embodiment of this aspect, which may be combined with any preceding embodiments, includes the heterologous EPR3 or EPR3-like polypeptide or the modified EPR3 or EPR3-like polypeptide being localized to a plant cell plasma membrane. Yet another embodiment of this aspect, which may be combined with any of the preceding embodiments that have an EPR3a or EPR3a-like polypeptide, includes the heterologous EPR3a or EPR3a-like polypeptide or the modified EPR3a or EPR3a-like polypeptide being localized to a plant cell plasma membrane. A further embodiment of this aspect that can be combined with any of the preceding embodiments that have localization to a plant cell plasma membrane includes the plant cell being a root cell. An additional embodiment of this aspect includes the root cell being a root epidermal cell or a root cortex cell. In a further embodiment of this aspect that can be combined with any of the preceding embodiments, the heterologous EPR3 or EPR3-like polypeptide or the modified EPR3 or EPR3-like polypeptide is expressed in a developing plant root system. In an additional embodiment of this aspect that can be combined with any of the preceding embodiments that has an EPR3a or EPR3a-like polypeptide, the heterologous EPR3a or EPR3a-like polypeptide or the modified EPR3a or EPR3a-like polypeptide is expressed in a developing plant root system.

[0112] In still another embodiment of this aspect, which may be combined with any of the preceding embodiments, the first nucleic acid sequence is operably linked to a first promoter. In an additional embodiment of this aspect, the first promoter is a root specific promoter, and the root specific promoter is optionally selected from the group of a NFR1 or NFR5/NFP promoter, an EPR3 or an EPR3a promoter, a Lotus NFR5 promoter, a Lotus NFR1 promoter, a maize allothioneine promoter, a chitinase promoter, a maize ZRP2 promoter, a tomato LeExt1 promoter, a glutamine synthetase soybean root promoter, a RCC3 promoter, a rice antiquitine promoter, a LRR receptor kinase promoter, or an Arabidopsis pCO2 promoter. In a further embodiment of this aspect, the first promoter is a constitutive promoter, and the constitutive promoter is optionally selected from the group of a CaMV35S promoter, a derivative of the CaMV35S promoter, a maize ubiquitin promoter, a trefoil promoter, a vein mosaic cassava virus promoter, or an Arabidopsis UBQ10 promoter. In yet another embodiment of this aspect, which may be combined with any of the preceding embodiments that has an EPR3a or an EPR3a-like polypeptide, the second nucleic acid sequence is operably linked to a second promoter. In an additional embodiment of this aspect, the second promoter is a root specific promoter, and the root specific promoter is optionally selected from the group of a NFR1 or NFR5/NFP promoter, an EPR3 or an EPR3a promoter, a Lotus NFR5 promoter, a Lotus NFR1 promoter, a maize allothioneine promoter, a chitinase promoter, a maize ZRP2 promoter, a tomato LeExt1 promoter, a glutamine synthetase soybean root promoter, a RCC3 promoter, a rice antiquitine promoter, a LRR receptor kinase promoter, or an Arabidopsis pCO2 promoter. In a further embodiment of this aspect, the second promoter is a constitutive promoter, and the constitutive promoter is optionally selected from the group of a CaMV35S promoter, a derivative of the CaMV35S promoter, a maize ubiquitin promoter, a trefoil promoter, a vein mosaic cassava virus promoter, or an Arabidopsis UBQ10 promoter. In an additional embodiment of this aspect, which may be combined with any of the preceding embodiments, the plant is selected from the group of corn (e.g., maize, Zea mays), rice (e.g., indica rice, japonica rice, aromatic rice, glutinous rice, Oryza sat/va, Oryza glaberrima), wild rice (e.g., Zizania spp., Porteresia spp.), wheat (e.g., common wheat, spelt, durum, einkorn, emmer, kamut, Triticum aestivum, Triticum spelta, Triticum durum, Triticum urartu, Triticum monococcum, Triticum turanicum, Triticum spp.), barley (e.g., Hordeum vulgare), sorghum (e.g., Sorghum bicolor), millet (e.g., finger millet, fonio millet, foxtail millet, pearl millet, barnyard millets, Eleusine coracana, Panicum sumatrense, Panicum milaceum, Setariaitalica, Pennisetum glaucum, Digitaria spp., Echinocloa spp.), teff (e.g., Eragrostis tef), oat (e.g., Avena sativa), triticale (e.g., X Triticosecale Wittmack, Triticosecale schlanstedtense Wittm., Triticosecale neoblaringhemii A. Camus, Triticosecale neoblaringhemii A. Camus), rye (e.g., Secale cereale, Secale cereanum), sugar cane (e.g., Saccharum officinarum, Saccharum spp.), apple (e.g., Malus pumila, Malus x domestica, Pyrus malus), pear (e.g., Pyrus communis, Pyrus x bretschneideri, Pyrus pyrifolia, Pyrus sinkiangensis, Pyrus pashia, Pyrus spp.), plum (e.g., Mirabelle, greengage, damson, Prunus domestica, Prunus salicina, Prunus mume), apricot (e.g., Prunus armeniaca, Prunus brigantine, Prunus mandshurica), peach (e.g., Prunus persica), almond (e.g., Prunus dulcis, Prunus amygdalus), walnut (e.g., Persian walnut, English walnut, black walnut, Juglans regia, Juglans nigra, Juglans cinerea, Juglans californica), cherry (e.g., Prunus avium, Prunus cerasus, Prunus yedoensis var. nudiflora), strawberry (e.g., Fragaria x ananassa, Fragaria chiloensis, Fragaria virginiana, Fragaria vesca), raspberry (e.g., European red raspberry, black raspberry, Rubus idaeus L., Rubus occidentalis, Rubus strigosus), blackberry (e.g., evergreen blackberry, Himalayan blackberry, Rubus fruticosus, Rubus ursinus, Rubus laciniatus, Rubus argutus, Rubus armeniacus, Rubus plicatus, Rubus ulmifolius, Rubus allegheniensis, Rubus subgenus Eubatus sect. Moriferi & Ursini), red currant (e.g., white currant, Ribes rubrum), black currant (e.g., cassis, Ribes nigrum), gooseberry (e.g., Ribes uva-crispa, Ribes grossulari, Ribes hirtellum), cowpea (e.g., Vigna unguiculata), melon (e.g., watermelon, winter melon, casabas, cantaloupe, honeydew, muskmelon, Citrullus lanatus, Benincasa hispida, Cucumis melo, Cucumis melo cantalupensis, Cucumis melo inodorus, Cucumis melo reticulatus), cucumber (e.g., slicing cucumbers, pickling cucumbers, English cucumber, Cucumis sativus), pumpkin (e.g., Cucurbita pepo, Cucurbita maxima), squash (e.g., gourd, Cucurbita argyrosperma, Cucurbita ficifolia, Cucurbita maxima, Cucurbita moschata), grape (e.g., Vitis vinifera, Vitis amurensis, Vitis labrusca, Vitis mustangensis, Vitis riparia, Vitis rotundifolia), hemp (e.g., cannabis, Cannabis sativa), hops (e.g., Humulus lupulus), birch (e.g., Betula spp.), beech (e.g., Fagus sylvatica, Fagus grandifolia, Fagus spp.), jujube (e.g., red date, Ziziphus jujube), cassava (e.g., manioc, yucca, Manihot esculenta), poplar (e.g., hybrid poplar, Populus trichocarpa, Populus tremula, Populus alba, Populus spp.), chestnut (e.g., Castanea mollissima, Castanea crenata, Castanea dentata, Castanea spp.), swamp oak (e.g., Casuarina glauca), rose gum (e.g., Eucalyptus grandis), oak (e.g., cork oak, Quercus suber, Quercus spp.), citrus (e.g., lemon, lime, orange, grapefruit, pomelo, citron, trifoliate orange, bergamot orange, bitter orange, blood orange, satsuma, clementine, mandarin, yuzu, finger lime, kaffir lime, kumquat, Citrus clementina, Citrus sinensis, Citrus trifoliata, Citrus japonica, Citrus maxima, Citrus australasica, Citrus reticulata, Citus aurantifolia, Citrus hystrix, Citrus x paradisi, Citrus x clementina, Citrus spp.), potato (e.g., russet potatoes, yellow potatoes, red potatoes, Solanum tuberosum), tomato (e.g., Solanum lycopersicum), pepper (e.g., sweet pepper, bell pepper, hot pepper, chili pepper, Capsicum L.), sweet potato (e.g., Ipomoea batatas), yam (e.g., Diascorea spp., Oxalis tuberosa), Trema spp. (e.g., Trema cannabina, Trema cubense, Trema discolor, Trema domingensis, Trema integerrima, Trema lamarckiana, Trema micrantha, Trema orientalis, Trema philippinensis, Trema strigilosa, Trema tomentosa, Trema levigata), or Jatropha spp. (e.g., Jatropha curcas). In yet another embodiment of this aspect, which may be combined with any of the preceding embodiments, the plant lacks functional rhizobial Nod factor receptors. In still another embodiment of this aspect, which may be combined with any of the preceding embodiments, the plant is not a legume. In an additional embodiment of this aspect, which may be combined with any of the preceding embodiments, the plant is not A. thaliana, N. tabacum, L. japonicus, or M. truncatula. In a further embodiment of this aspect, which may be combined with any of the above embodiments, the plant part is a leaf, a stem, a root, a root primordia, a flower, a seed, a fruit, a kernel, a grain, a cell, or a portion thereof. An additional embodiment of this aspect includes the plant part being a fruit, a kernel, or a grain.

[0113] In some aspects, the present disclosure relates to a pollen grain or an ovule of the genetically altered plant of any of the above embodiments.

[0114] In some aspects, the present disclosure relates to a protoplast produced from the plant of any of the above embodiments.

[0115] In some aspects, the present disclosure relates to a tissue culture produced from protoplasts or cells from the plant of any of the above embodiments, wherein the cells or protoplasts are produced from a plant part selected from the group of leaf, anther, pistil, stem, petiole, root, root primordia, root tip, fruit, seed, flower, cotyledon, hypocotyl, embryo, or meristematic cell.

[0116] An additional aspect of the disclosure includes a genetically altered plant or part thereof including a first nucleic acid sequence encoding a heterologous EPR3a or EPR3a-like polypeptide or a modified EPR3a or EPR3a-like polypeptide, wherein the heterologous EPR3a or EPR3a-like polypeptide or the modified EPR3a or EPR3a-like polypeptide provides increased selectivity for a beneficial commensal microbe as compared to a wild-type plant under the same conditions. Selectivity may mean positive selection of the beneficial commensal microbe, negative selection of other microbes that are not the beneficial commensal, or a combination thereof. An additional embodiment of this aspect includes the plant or part thereof further including a second nucleic acid sequence encoding a heterologous EPR3 or EPR3-like polypeptide or a modified EPR3 or EPR3-like polypeptide. In a further embodiment of this aspect, which may be combined with any of the preceding embodiments, the heterologous EPR3a or EPR3a-like polypeptide is selected from the group of a polypeptide with at least 70% sequence identity, at least 71% sequence identity, at least 72% sequence identity, at least 73% sequence identity, at least 74% sequence identity, at least 75% sequence identity, at least 76% sequence identity, at least 77% sequence identity, at least 78% sequence identity, at least 79% sequence identity, at least 80% sequence identity, at least 81% sequence identity, at least 82% sequence identity, at least 83% sequence identity, at least 84% sequence identity, at least 85% sequence identity, at least 86% sequence identity, at least 87% sequence identity, at least 88% sequence identity, at least 89% sequence identity, at least 90% sequence identity, at least 91% sequence identity, at least 92% sequence identity, at least 93% sequence identity, at least 94% sequence identity, at least 95% sequence identity, at least 96% sequence identity, at least 97% sequence identity, at least 98% sequence identity, or at least 99% sequence identity to SEQ ID NO: 62 [L. japonicus (EPR3a)], SEQ ID NO: 63, SEQ ID NO: 64, SEQ ID NO: 65, SEQ ID NO: 66, SEQ ID NO: 67, SEQ ID NO: 68, SEQ ID NO: 69, SEQ ID NO: 70, SEQ ID NO: 71, SEQ ID NO: 72, SEQ ID NO: 73, SEQ ID NO: 74, SEQ ID NO: 75, SEQ ID NO: 76, SEQ ID NO: 77, SEQ ID NO: 78, SEQ ID NO: 79, SEQ ID NO: 80, SEQ ID NO: 81, SEQ ID NO: 82, SEQ ID NO: 83, SEQ ID NO: 84, SEQ ID NO: 85, SEQ ID NO: 86, SEQ ID NO: 87, SEQ ID NO: 88, SEQ ID NO: 89, SEQ ID NO: 90, SEQ ID NO: 91, or SEQ ID NO: 92. Yet another embodiment of this aspect includes the heterologous EPR3a or EPR3a-like polypeptide being SEQ ID NO: 62 [L. japonicus (EPR3a)], SEQ ID NO: 63, SEQ ID NO: 64, SEQ ID NO: 65, SEQ ID NO: 66, SEQ ID NO: 67, SEQ ID NO: 68, SEQ ID NO: 69, SEQ ID NO: 70, SEQ ID NO: 71, SEQ ID NO: 72, SEQ ID NO: 73, SEQ ID NO: 74, SEQ ID NO: 75, SEQ ID NO: 76, SEQ ID NO: 77, SEQ ID NO: 78, SEQ ID NO: 79, SEQ ID NO: 80, SEQ ID NO: 81, SEQ ID NO: 82, SEQ ID NO: 83, SEQ ID NO: 84, SEQ ID NO: 85, SEQ ID NO: 86, SEQ ID NO: 87, SEQ ID NO: 88, SEQ ID NO: 89, SEQ ID NO: 90, SEQ ID NO: 91, or SEQ ID NO: 92. Still another embodiment of this aspect, which may be combined with any of the preceding embodiments that has a heterologous EPR3 or EPR3-like polypeptide, the heterologous EPR3 or EPR3-like polypeptide is selected from the group of a first polypeptide with at least 70% sequence identity, at least 71% sequence identity, at least 72% sequence identity, at least 73% sequence identity, at least 74% sequence identity, at least 75% sequence identity, at least 76% sequence identity, at least 77% sequence identity, at least 78% sequence identity, at least 79% sequence identity, at least 80% sequence identity, at least 81% sequence identity, at least 82% sequence identity, at least 83% sequence identity, at least 84% sequence identity, at least 85% sequence identity, at least 86% sequence identity, at least 87% sequence identity, at least 88% sequence identity, at least 89% sequence identity, at least 90% sequence identity, at least 91% sequence identity, at least 92% sequence identity, at least 93% sequence identity, at least 94% sequence identity, at least 95% sequence identity, at least 96% sequence identity, at least 97% sequence identity, at least 98% sequence identity, or at least 99% sequence identity to SEQ ID NO: 1 [L. japonicus (BAI79269.1)], a second polypeptide with at least 70% sequence identity, at least 71% sequence identity, at least 72% sequence identity, at least 73% sequence identity, at least 74% sequence identity, at least 75% sequence identity, at least 76% sequence identity, at least 77% sequence identity, at least 78% sequence identity, at least 79% sequence identity, at least 80% sequence identity, at least 81% sequence identity, at least 82% sequence identity, at least 83% sequence identity, at least 84% sequence identity, at least 85% sequence identity, at least 86% sequence identity, at least 87% sequence identity, at least 88% sequence identity, at least 89% sequence identity, at least 90% sequence identity, at least 91% sequence identity, at least 92% sequence identity, at least 93% sequence identity, at least 94% sequence identity, at least 95% sequence identity, at least 96% sequence identity, at least 97% sequence identity, at least 98% sequence identity, or at least 99% sequence identity to SEQ ID NO: 2 [Chickpea (XP_004489790.1)], a third polypeptide with at least 70% sequence identity, at least 71% sequence identity, at least 72% sequence identity, at least 73% sequence identity, at least 74% sequence identity, at least 75% sequence identity, at least 76% sequence identity, at least 77% sequence identity, at least 78% sequence identity, at least 79% sequence identity, at least 80% sequence identity, at least 81% sequence identity, at least 82% sequence identity, at least 83% sequence identity, at least 84% sequence identity, at least 85% sequence identity, at least 86% sequence identity, at least 87% sequence identity, at least 88% sequence identity, at least 89% sequence identity, at least 90% sequence identity, at least 91% sequence identity, at least 92% sequence identity, at least 93% sequence identity, at least 94% sequence identity, at least 95% sequence identity, at least 96% sequence identity, at least 97% sequence identity, at least 98% sequence identity, or at least 99% sequence identity to SEQ ID NO: 3 [Medicago (XP_003613165.1)], a fourth polypeptide with at least 70% sequence identity, at least 71% sequence identity, at least 72% sequence identity, at least 73% sequence identity, at least 74% sequence identity, at least 75% sequence identity, at least 76% sequence identity, at least 77% sequence identity, at least 78% sequence identity, at least 79% sequence identity, at least 80% sequence identity, at least 81% sequence identity, at least 82% sequence identity, at least 83% sequence identity, at least 84% sequence identity, at least 85% sequence identity, at least 86% sequence identity, at least 87% sequence identity, at least 88% sequence identity, at least 89% sequence identity, at least 90% sequence identity, at least 91% sequence identity, at least 92% sequence identity, at least 93% sequence identity, at least 94% sequence identity, at least 95% sequence identity, at least 96% sequence identity, at least 97% sequence identity, at least 98% sequence identity, or at least 99% sequence identity to SEQ ID NO: 4 [Soybean (XP_003517716.1)], a fifth polypeptide with at least 70% sequence identity, at least 71% sequence identity, at least 72% sequence identity, at least 73% sequence identity, at least 74% sequence identity, at least 75% sequence identity, at least 76% sequence identity, at least 77% sequence identity, at least 78% sequence identity, at least 79% sequence identity, at least 80% sequence identity, at least 81% sequence identity, at least 82% sequence identity, at least 83% sequence identity, at least 84% sequence identity, at least 85% sequence identity, at least 86% sequence identity, at least 87% sequence identity, at least 88% sequence identity, at least 89% sequence identity, at least 90% sequence identity, at least 91% sequence identity, at least 92% sequence identity, at least 93% sequence identity, at least 94% sequence identity, at least 95% sequence identity, at least 96% sequence identity, at least 97% sequence identity, at least 98% sequence identity, or at least 99% sequence identity to SEQ ID NO: 5 [Phaseolus (XP_007157313.1)], a sixth polypeptide with at least 70% sequence identity, at least 71% sequence identity, at least 72% sequence identity, at least 73% sequence identity, at least 74% sequence identity, at least 75% sequence identity, at least 76% sequence identity, at least 77% sequence identity, at least 78% sequence identity, at least 79% sequence identity, at least 80% sequence identity, at least 81% sequence identity, at least 82% sequence identity, at least 83% sequence identity, at least 84% sequence identity, at least 85% sequence identity, at least 86% sequence identity, at least 87% sequence identity, at least 88% sequence identity, at least 89% sequence identity, at least 90% sequence identity, at least 91% sequence identity, at least 92% sequence identity, at least 93% sequence identity, at least 94% sequence identity, at least 95% sequence identity, at least 96% sequence identity, at least 97% sequence identity, at least 98% sequence identity, or at least 99% sequence identity to SEQ ID NO: 6 [Populus (XP_002322185.1)], a seventh polypeptide with at least 70% sequence identity, at least 71% sequence identity, at least 72% sequence identity, at least 73% sequence identity, at least 74% sequence identity, at least 75% sequence identity, at least 76% sequence identity, at least 77% sequence identity, at least 78% sequence identity, at least 79% sequence identity, at least 80% sequence identity, at least 81% sequence identity, at least 82% sequence identity, at least 83% sequence identity, at least 84% sequence identity, at least 85% sequence identity, at least 86% sequence identity, at least 87% sequence identity, at least 88% sequence identity, at least 89% sequence identity, at least 90% sequence identity, at least 91% sequence identity, at least 92% sequence identity, at least 93% sequence identity, at least 94% sequence identity, at least 95% sequence identity, at least 96% sequence identity, at least 97% sequence identity, at least 98% sequence identity, or at least 99% sequence identity to SEQ ID NO: 7 [Malta (XP_008340354.1)], an eighth polypeptide with at least 70% sequence identity, at least 71% sequence identity, at least 72% sequence identity, at least 73% sequence identity, at least 74% sequence identity, at least 75% sequence identity, at least 76% sequence identity, at least 77% sequence identity, at least 78% sequence identity, at least 79% sequence identity, at least 80% sequence identity, at least 81% sequence identity, at least 82% sequence identity, at least 83% sequence identity, at least 84% sequence identity, at least 85% sequence identity, at least 86% sequence identity, at least 87% sequence identity, at least 88% sequence identity, at least 89% sequence identity, at least 90% sequence identity, at least 91% sequence identity, at least 92% sequence identity, at least 93% sequence identity, at least 94% sequence identity, at least 95% sequence identity, at least 96% sequence identity, at least 97% sequence identity, at least 98% sequence identity, or at least 99% sequence identity to SEQ ID NO: 8 [Vitis (XP_002272814.2)], a ninth polypeptide with at least 70% sequence identity, at least 71% sequence identity, at least 72% sequence identity, at least 73% sequence identity, at least 74% sequence identity, at least 75% sequence identity, at least 76% sequence identity, at least 77% sequence identity, at least 78% sequence identity, at least 79% sequence identity, at least 80% sequence identity, at least 81% sequence identity, at least 82% sequence identity, at least 83% sequence identity, at least 84% sequence identity, at least 85% sequence identity, at least 86% sequence identity, at least 87% sequence identity, at least 88% sequence identity, at least 89% sequence identity, at least 90% sequence identity, at least 91% sequence identity, at least 92% sequence identity, at least 93% sequence identity, at least 94% sequence identity, at least 95% sequence identity, at least 96% sequence identity, at least 97% sequence identity, at least 98% sequence identity, or at least 99% sequence identity to SEQ ID NO: 9 [Theobroma (XP_007036352.1)], a tenth polypeptide with at least 70% sequence identity, at least 71% sequence identity, at least 72% sequence identity, at least 73% sequence identity, at least 74% sequence identity, at least 75% sequence identity, at least 76% sequence identity, at least 77% sequence identity, at least 78% sequence identity, at least 79% sequence identity, at least 80% sequence identity, at least 81% sequence identity, at least 82% sequence identity, at least 83% sequence identity, at least 84% sequence identity, at least 85% sequence identity, at least 86% sequence identity, at least 87% sequence identity, at least 88% sequence identity, at least 89% sequence identity, at least 90% sequence identity, at least 91% sequence identity, at least 92% sequence identity, at least 93% sequence identity, at least 94% sequence identity, at least 95% sequence identity, at least 96% sequence identity, at least 97% sequence identity, at least 98% sequence identity, or at least 99% sequence identity to SEQ ID NO: 10 [Ricinus (XP_002527912.1)], an eleventh polypeptide with at least 70% sequence identity, at least 71% sequence identity, at least 72% sequence identity, at least 73% sequence identity, at least 74% sequence identity, at least 75% sequence identity, at least 76% sequence identity, at least 77% sequence identity, at least 78% sequence identity, at least 79% sequence identity, at least 80% sequence identity, at least 81% sequence identity, at least 82% sequence identity, at least 83% sequence identity, at least 84% sequence identity, at least 85% sequence identity, at least 86% sequence identity, at least 87% sequence identity, at least 88% sequence identity, at least 89% sequence identity, at least 90% sequence identity, at least 91% sequence identity, at least 92% sequence identity, at least 93% sequence identity, at least 94% sequence identity, at least 95% sequence identity, at least 96% sequence identity, at least 97% sequence identity, at least 98% sequence identity, or at least 99% sequence identity to SEQ ID NO: 11 [Fragaria (XP_004300916.1)], a twelfth polypeptide with at least 70% sequence identity, at least 71% sequence identity, at least 72% sequence identity, at least 73% sequence identity, at least 74% sequence identity, at least 75% sequence identity, at least 76% sequence identity, at least 77% sequence identity, at least 78% sequence identity, at least 79% sequence identity, at least 80% sequence identity, at least 81% sequence identity, at least 82% sequence identity, at least 83% sequence identity, at least 84% sequence identity, at least 85% sequence identity, at least 86% sequence identity, at least 87% sequence identity, at least 88% sequence identity, at least 89% sequence identity, at least 90% sequence identity, at least 91% sequence identity, at least 92% sequence identity, at least 93% sequence identity, at least 94% sequence identity, at least 95% sequence identity, at least 96% sequence identity, at least 97% sequence identity, at least 98% sequence identity, or at least 99% sequence identity to SEQ ID NO: 12 [Maize (XP_008657477.1)], a thirteenth polypeptide with at least 70% sequence identity, at least 71% sequence identity, at least 72% sequence identity, at least 73% sequence identity, at least 74% sequence identity, at least 75% sequence identity, at least 76% sequence identity, at least 77% sequence identity, at least 78% sequence identity, at least 79% sequence identity, at least 80% sequence identity, at least 81% sequence identity, at least 82% sequence identity, at least 83% sequence identity, at least 84% sequence identity, at least 85% sequence identity, at least 86% sequence identity, at least 87% sequence identity, at least 88% sequence identity, at least 89% sequence identity, at least 90% sequence identity, at least 91% sequence identity, at least 92% sequence identity, at least 93% sequence identity, at least 94% sequence identity, at least 95% sequence identity, at least 96% sequence identity, at least 97% sequence identity, at least 98% sequence identity, or at least 99% sequence identity to SEQ ID NO: 13 [Rice (XP_015628733.1)], a fourteenth polypeptide with at least 70% sequence identity, at least 71% sequence identity, at least 72% sequence identity, at least 73% sequence identity, at least 74% sequence identity, at least 75% sequence identity, at least 76% sequence identity, at least 77% sequence identity, at least 78% sequence identity, at least 79% sequence identity, at least 80% sequence identity, at least 81% sequence identity, at least 82% sequence identity, at least 83% sequence identity, at least 84% sequence identity, at least 85% sequence identity, at least 86% sequence identity, at least 87% sequence identity, at least 88% sequence identity, at least 89% sequence identity, at least 90% sequence identity, at least 91% sequence identity, at least 92% sequence identity, at least 93% sequence identity, at least 94% sequence identity, at least 95% sequence identity, at least 96% sequence identity, at least 97% sequence identity, at least 98% sequence identity, or at least 99% sequence identity to SEQ ID NO: 14 [Wheat (CDM80098.1)], or a fifteenth polypeptide with at least 70% sequence identity, at least 71% sequence identity, at least 72% sequence identity, at least 73% sequence identity, at least 74% sequence identity, at least 75% sequence identity, at least 76% sequence identity, at least 77% sequence identity, at least 78% sequence identity, at least 79% sequence identity, at least 80% sequence identity, at least 81% sequence identity, at least 82% sequence identity, at least 83% sequence identity, at least 84% sequence identity, at least 85% sequence identity, at least 86% sequence identity, at least 87% sequence identity, at least 88% sequence identity, at least 89% sequence identity, at least 90% sequence identity, at least 91% sequence identity, at least 92% sequence identity, at least 93% sequence identity, at least 94% sequence identity, at least 95% sequence identity, at least 96% sequence identity, at least 97% sequence identity, at least 98% sequence identity, or at least 99% sequence identity to SEQ ID NO: 15 [Barley (MLOC_5489.2)]. A further embodiment of this aspect includes the heterologous EPR3 or EPR3-like polypeptide being selected from the group of SEQ ID NO: 1 [L. japonicus (EPR3)], SEQ ID NO: 2 [Chickpea (XP_004489790.1)], SEQ ID NO: 3 [Medicago (XP_003613165.1)], SEQ ID NO: 4 [Soybean (XP_003517716.1)], SEQ ID NO: 5 [Phaseolus (XP_007157313.1)], SEQ ID NO: 6 [Populus (XP_002322185.1)], SEQ ID NO: 7 [Malus (XP_008340354.1)], SEQ ID NO: 8 [Vitis (XP_002272814.2)], SEQ ID NO: 9 [Theobroma (XP_007036352.1)], SEQ ID NO: 10 [Ricinus (XP_002527912.1)], SEQ ID NO: 11 [Fragaria (XP_004300916.1)], SEQ ID NO: 12 [Maize (XP_008657477.1)], SEQ ID NO: 13 [Rice (XP_015628733.1)], SEQ ID NO: 14 [Wheat (CDM80098.1)], or SEQ ID NO: 15 [Barley (MLOC_5489.2)].

[0117] Still another embodiment of this aspect, which may be combined with any of the preceding embodiments, the modified EPR3a or EPR3a-like polypeptide comprises a modified ectodomain that has been replaced with all or a portion of an ectodomain of the heterologous EPR3a or EPR3a-like polypeptide, optionally all or a part of the M1 domain, the M2 domain, the LysM3 domain, or all three. In an additional embodiment of this aspect, the portion replaced is at least 10%, at least 11%, at least 12%, at least 13%, at least 14%, at least 15%, at least 16%, at least 17%, at least 18%, at least 19%, at least 20%, at least 21%, at least 22%, at least 23%, at least 24%, at least 25%, at least 26%, at least 27%, at least 28%, at least 29%, at least 30%, at least 31%, at least 32%, at least 33%, at least 34%, at least 35%, at least 36%, at least 37%, at least 38%, at least 39%, at least 40%, at least 41%, at least 42%, at least 43%, at least 44%, at least 45%, at least 46%, at least 47%, at least 48%, at least 49%, at least 50%, at least 51%, at least 52%, at least 53%, at least 54%, at least 55%, at least 56%, at least 57%, at least 58%, at least 59%, at least 60%, at least 61%, at least 62%, at least 63%, at least 64%, at least 65%, at least 66%, at least 67%, at least 68%, at least 69%, at least 70%, at least 71%, at least 72%, at least 73%, at least 74%, at least 75%, at least 76%, at least 77%, at least 78%, at least 79%, at least 80%, at least 81%, at least 82%, at least 83%, at least 84%, at least 85%, at least 86%, at least 87%, at least 88%, at least 89%, at least 90%, less than 10%, less than 11%, less than 12%, less than 13%, less than 14%, less than 15%, less than 16%, less than 17%, less than 18%, less than 19%, less than 20%, less than 21%, less than 22%, less than 23%, less than 24%, less than 25%, less than 26%, less than 27%, less than 28%, less than 29%, less than 30%, less than 31%, less than 32%, less than 33%, less than 34%, less than 35%, less than 36%, less than 37%, less than 38%, less than 39%, less than 40%, less than 41%, less than 42%, less than 43%, less than 44%, less than 45%, less than 46%, less than 47%, less than 48%, less than 49%, less than 50%, less than 51%, less than 52%, less than 53%, less than 54%, less than 55%, less than 56%, less than 57%, less than 58%, less than 59%, less than 60%, less than 61%, less than 62%, less than 63%, less than 64%, less than 65%, less than 66%, less than 67%, less than 68%, less than 69%, less than 70%, less than 71%, less than 72%, less than 73%, less than 74%, less than 75%, less than 76%, less than 77%, less than 78%, less than 79%, less than 80%, less than 81%, less than 82%, less than 83%, less than 84%, less than 85%, less than 86%, less than 87%, less than 88%, less than 89%, or less than 90%, of the ectodomain or, optionally all or a part of the M1 domain, the M2 domain, the LysM3 domain, or all three. In yet another embodiment of this aspect, which may be combined with any of the preceding embodiments that have an EPR3 or EPR3-like polypeptide, the modified EPR3 or EPR3-like polypeptide includes a modified ectodomain that has been replaced with all or a portion of an ectodomain of the heterologous EPR3 or EPR3-like polypeptide, optionally all or a part of the M1 domain, the M2 domain, the LysM3 domain, or all three. In an additional embodiment of this aspect, the portion replaced is at least 10%, at least 11%, at least 12%, at least 13%, at least 14%, at least 15%, at least 16%, at least 17%, at least 18%, at least 19%, at least 20%, at least 21%, at least 22%, at least 23%, at least 24%, at least 25%, at least 26%, at least 27%, at least 28%, at least 29%, at least 30%, at least 31%, at least 32%, at least 33%, at least 34%, at least 35%, at least 36%, at least 37%, at least 38%, at least 39%, at least 40%, at least 41%, at least 42%, at least 43%, at least 44%, at least 45%, at least 46%, at least 47%, at least 48%, at least 49%, at least 50%, at least 51%, at least 52%, at least 53%, at least 54%, at least 55%, at least 56%, at least 57%, at least 58%, at least 59%, at least 60%, at least 61%, at least 62%, at least 63%, at least 64%, at least 65%, at least 66%, at least 67%, at least 68%, at least 69%, at least 70%, at least 71%, at least 72%, at least 73%, at least 74%, at least 75%, at least 76%, at least 77%, at least 78%, at least 79%, at least 80%, at least 81%, at least 82%, at least 83%, at least 84%, at least 85%, at least 86%, at least 87%, at least 88%, at least 89%, at least 90%, less than 10%, less than 11%, less than 12%, less than 13%, less than 14%, less than 15%, less than 16%, less than 17%, less than 18%, less than 19%, less than 20%, less than 21%, less than 22%, less than 23%, less than 24%, less than 25%, less than 26%, less than 27%, less than 28%, less than 29%, less than 30%, less than 31%, less than 32%, less than 33%, less than 34%, less than 35%, less than 36%, less than 37%, less than 38%, less than 39%, less than 40%, less than 41%, less than 42%, less than 43%, less than 44%, less than 45%, less than 46%, less than 47%, less than 48%, less than 49%, less than 50%, less than 51%, less than 52%, less than 53%, less than 54%, less than 55%, less than 56%, less than 57%, less than 58%, less than 59%, less than 60%, less than 61%, less than 62%, less than 63%, less than 64%, less than 65%, less than 66%, less than 67%, less than 68%, less than 69%, less than 70%, less than 71%, less than 72%, less than 73%, less than 74%, less than 75%, less than 76%, less than 77%, less than 78%, less than 79%, less than 80%, less than 81%, less than 82%, less than 83%, less than 84%, less than 85%, less than 86%, less than 87%, less than 88%, less than 89%, or less than 90%, of the ectodomain or, optionally all or a part of the M1 domain, the M2 domain, the LysM3 domain, or all three. A further embodiment of this aspect, which may be combined with any of the preceding embodiments that have an EPR3 or EPR3-like polypeptide, includes the heterologous EPR3a or EPR3a-like polypeptide and the heterologous EPR3 or EPR3-like polypeptide being from the same plant species or the same plant variety.

[0118] Yet another embodiment of this aspect, which may be combined with any of the preceding embodiments, includes the expression of the heterologous EPR3a or EPR3a-like polypeptide or the modified EPR3a or EPR3a-like polypeptide allowing the plant or part thereof to recognize an EPS, a beta-glucan, a cyclic beta-glucan, a LPS, or a surface carbohydrate produced by the microbe. Still another embodiment of this aspect, which may be combined with any of the preceding embodiments that have an EPR3 or EPR3-like polypeptide, includes the expression of the heterologous EPR3 or EPR3-like polypeptide or the modified EPR3a or EPR3a-like polypeptide allowing the plant or part thereof to recognize an EPS, a beta-glucan, a cyclic beta-glucan, a LPS, or a surface carbohydrate produced by the microbe. In a further embodiment of this aspect, the expression of the heterologous EPR3a or EPR3a-like polypeptide or the modified EPR3a or EPR3a-like polypeptide and the expression of the heterologous EPR3 or EPR3-like polypeptide or the modified EPR3 or EPR3-like polypeptide allows the plant or part thereof to recognize an EPS, a beta-glucan, a cyclic beta-glucan, a LPS, or a surface carbohydrate produced by the microbe. In an additional embodiment of this aspect that can be combined with any preceding embodiments including an EPS produced by the microbe, the microbe is a commensal bacteria, optionally a nitrogen-fixing bacteria, or a mycorrhizal fungi. A further embodiment of this aspect includes the nitrogen-fixing bacteria being selected from the group of Mesorhizobium loti, Mesorhizobium huakuii, Mesorhizobium mediterraneum, Mesorhizobium ciceri, Mesorhizobium spp., Rhizobium mongolense, Rhizobium tropici, Rhizobium etli phaseoli, Rhizobium giardinii, Rhizobium leguminosarum optionally R. leguminosarum trifolii, R. leguminosarum viciae, and R. leguminosarum phaseoli, Burkholderiales optionally symbionts of Mimosa, Sinorhizobium meliloti, Sinorhizobium medicae, Sinorhizobium fredii, Sinorhizobium fredii NGR234, Azorhizobium caulinodans, Bradyrhizobium japonicum, Bradyrhizobium elkanii, Bradyrhizobium liaonginense, Rhizobium spp., Mesorhizobium spp., Sinorhizobium spp., Azorhizobium spp. Frankia spp., or any combination thereof, or the mycorrhizal fungi being selected from the group of Acaulosporaceae spp., Diversisporaceae spp., Gigasporaceae spp., Pacisporaceae spp., Funneliformis spp., Glomus spp., Rhizophagus spp., Sclerocystis spp., Septoglomus spp., Claroideoglomus spp., Ambispora spp., Archaeospora spp., Geosiphon pyriformis, Paraglomus spp., other species in the division Glomeromycota, or any combination thereof. Still another embodiment of this aspect, which may be combined with any preceding embodiments, includes the heterologous EPR3a or EPR3a-like polypeptide or the modified EPR3a or EPR3a-like polypeptide being localized to a plant cell plasma membrane. Yet another embodiment of this aspect, which may be combined with any of the preceding embodiments that have an EPR3 or EPR3-like polypeptide, includes the heterologous EPR3 or EPR3-like polypeptide or the modified EPR3 or EPR3-like polypeptide being localized to a plant cell plasma membrane. A further embodiment of this aspect that can be combined with any of the preceding embodiments that have localization to a plant cell plasma membrane includes the plant cell being a root cell. An additional embodiment of this aspect includes the root cell being a root epidermal cell or a root cortex cell. In a further embodiment of this aspect that can be combined with any of the preceding embodiments, the heterologous EPR3a or EPR3a-like polypeptide or the modified EPR3a or EPR3a-like polypeptide is expressed in a developing plant root system. In an additional embodiment of this aspect that can be combined with any of the preceding embodiments that has an EPR3 or EPR3-like polypeptide, the heterologous EPR3 or EPR3-like polypeptide or the modified EPR3 or EPR3-like polypeptide is expressed in a developing plant root system.

[0119] In still another embodiment of this aspect, which may be combined with any of the preceding embodiments, the first nucleic acid sequence is operably linked to a first promoter. In an additional embodiment of this aspect, the first promoter is a root specific promoter, and the root specific promoter is optionally selected from the group of a NFR1 or NFR5/NFP promoter, an EPR3 or an EPR3a promoter, a Lotus NFR5 promoter, a Lotus NFR1 promoter, a maize allothioneine promoter, a chitinase promoter, a maize ZRP2 promoter, a tomato LeExt1 promoter, a glutamine synthetase soybean root promoter, a RCC3 promoter, a rice antiquitine promoter, a LRR receptor kinase promoter, or an Arabidopsis pCO2 promoter. In a further embodiment of this aspect, the first promoter is a constitutive promoter, and the constitutive promoter is optionally selected from the group of a CaMV35S promoter, a derivative of the CaMV35S promoter, a maize ubiquitin promoter, a trefoil promoter, a vein mosaic cassava virus promoter, or an Arabidopsis UBQ10 promoter. In yet another embodiment of this aspect, which may be combined with any of the preceding embodiments that has an EPR3 or an EPR3-like polypeptide, the second nucleic acid sequence is operably linked to a second promoter. In an additional embodiment of this aspect, the second promoter is a root specific promoter, and the root specific promoter is optionally selected from the group of a NFR1 or NFR5/NFP promoter, an EPR3 or an EPR3a promoter, a Lotus NFR5 promoter, a Lotus NFR1 promoter, a maize allothioneine promoter, a chitinase promoter, a maize ZRP2 promoter, a tomato LeExt1 promoter, a glutamine synthetase soybean root promoter, a RCC3 promoter, a rice antiquitine promoter, a LRR receptor kinase promoter, or an Arabidopsis pCO2 promoter. In a further embodiment of this aspect, the second promoter is a constitutive promoter, and the constitutive promoter is optionally selected from the group of a CaMV35S promoter, a derivative of the CaMV35S promoter, a maize ubiquitin promoter, a trefoil promoter, a vein mosaic cassava virus promoter, or an Arabidopsis UBQ10 promoter. In an additional embodiment of this aspect, which may be combined with any of the preceding embodiments, the plant is selected from the group of group of corn (e.g., maize, Zea mays), rice (e.g., indica rice, japonica rice, aromatic rice, glutinous rice, Oryza sativa, Oryza glaberrima), wild rice (e.g., Zizania spp., Porteresia spp.), wheat (e.g., common wheat, spelt, durum, einkorn, emmer, kamut, Triticum aestivum, Triticum spelta, Triticum durum, Triticum urartu, Triticum monococcum, Triticum turanicum, Triticum spp.), barley (e.g., Hordeum vulgare), sorghum (e.g., Sorghum bicolor), millet (e.g., finger millet, fonio millet, foxtail millet, pearl millet, barnyard millets, Eleusine coracana, Panicum sumatrense, Panicum milaceum, Setaria italica, Pennisetum glaucum, Digitaria spp., Echinocloa spp.), teff (e.g., Eragrostis tef), oat (e.g., Avena sativa), triticale (e.g., X Triticosecale Wittmack, Triticosecale schlanstedtense Wittm., Triticosecale neoblaringhemii A. Camus, Triticosecale neoblaringhemii A. Camus), rye (e.g., Secale cereale, Secale cereanum), sugar cane (e.g., Saccharum officinarum, Saccharum spp.), apple (e.g., Malus pumila, Malus x domestica, Pyrus malus), pear (e.g., Pyrus communis, Pyrus x bretschneideri, Pyrus pyrifolia, Pyrus sinkiangensis, Pyrus pashia, Pyrus spp.), plum (e.g., Mirabelle, greengage, damson, Prunus domestica, Prunus salicina, Prunus mume), apricot (e.g., Prunus armeniaca, Prunus brigantine, Prunus mandshurica), peach (e.g., Prunus persica), almond (e.g., Prunus dulcis, Prunus amygdalus), walnut (e.g., Persian walnut, English walnut, black walnut, Juglans regia, Juglans nigra, Juglans cinerea, Juglans californica), cherry (e.g., Prunus avium, Prunus cerasus, Prunus yedoensis var. nudiflora), strawberry (e.g., Fragaria x ananassa, Fragaria chiloensis, Fragaria virginiana, Fragaria vesca), raspberry (e.g., European red raspberry, black raspberry, Rubus idaeus L., Rubus occidentalis, Rubus strigosus), blackberry (e.g., evergreen blackberry, Himalayan blackberry, Rubus fruticosus, Rubus ursinus, Rubus laciniatus, Rubus argutus, Rubus armeniacus, Rubus plicatus, Rubus ulmifolius, Rubus allegheniensis, Rubus subgenus Eubatus sect. Moriferi & Ursini), red currant (e.g., white currant, Ribes rubrum), black currant (e.g., cassis, Ribes nigrum), gooseberry (e.g., Ribes uva-crispa, Ribes grossulari, Ribes hirtellum), cowpea (e.g., Vigna unguiculata), melon (e.g., watermelon, winter melon, casabas, cantaloupe, honeydew, muskmelon, Citrullus lanatus, Benincasa hispida, Cucumis melo, Cucumis melo cantalupensis, Cucumis melo inodorus, Cucumis melo reticulatus), cucumber (e.g., slicing cucumbers, pickling cucumbers, English cucumber, Cucumis sativus), pumpkin (e.g., Cucurbita pepo, Cucurbita maxima), squash (e.g., gourd, Cucurbita argyrosperma, Cucurbita ficifolia, Cucurbita maxima, Cucurbita moschata), grape (e.g., Vitis vinifera, Vitis amurensis, Vitis labrusca, Vitis mustangensis, Vitis riparia, Vitis rotundifolia), hemp (e.g., cannabis, Cannabis sativa), hops (e.g., Humulus lupulus), birch (e.g., Betula spp.), beech (e.g., Fagus sylvatica, Fagus grandifolia, Fagus spp.), jujube (e.g., red date, Ziziphus jujube), cassava (e.g., manioc, yucca, Manihot esculenta), poplar (e.g., hybrid poplar, Populus trichocarpa, Populus tremula, Populus alba, Populus spp.), chestnut (e.g., Castanea mollissima, Castanea crenata, Castanea dentata, Castanea spp.), swamp oak (e.g., Casuarina glauca), rose gum (e.g., Eucalyptus grandis), oak (e.g., cork oak, Quercus suber, Quercus spp.), citrus (e.g., lemon, lime, orange, grapefruit, pomelo, citron, trifoliate orange, bergamot orange, bitter orange, blood orange, satsuma, clementine, mandarin, yuzu, finger lime, kaffir lime, kumquat, Citrus clementina, Citrus sinensis, Citrus trifoliata, Citrus japonica, Citrus maxima, Citrus australasica, Citrus reticulata, Citus aurantifolia, Citrus hystrix, Citrus x paradisi, Citrus x clementina, Citrus spp.), potato (e.g., russet potatoes, yellow potatoes, red potatoes, Solanum tuberosum), tomato (e.g., Solanum lycopersicum), pepper (e.g., sweet pepper, bell pepper, hot pepper, chili pepper, Capsicum L.), sweet potato (e.g., Ipomoea batatas), yam (e.g., Diascorea spp., Oxalis tuberosa), Trema spp. (e.g., Trema cannabina, Trema cubense, Trema discolor, Trema domingensis, Trema integerrima, Trema lamarckiana, Trema micrantha, Trema orientalis, Trema philippinensis, Trema strigilosa, Trema tomentosa, Trema levigata), and Jatropha spp. (e.g., Jatropha curcas). In yet another embodiment of this aspect, which may be combined with any of the preceding embodiments, the plant lacks functional rhizobial Nod factor receptors. In still another embodiment of this aspect, which may be combined with any of the preceding embodiments, the plant is not a legume. In an additional embodiment of this aspect, which may be combined with any of the preceding embodiments, the plant is not A. thaliana, N. tabacum, L. japonicus, or M. truncatula. In a further embodiment of this aspect, which may be combined with any of the above embodiments, the plant part is a leaf, a stem, a root, a root primordia, a flower, a seed, a fruit, a kernel, a grain, a cell, or a portion thereof. An additional embodiment of this aspect includes the plant part being a fruit, a kernel, or a grain.

[0120] In some aspects, the present disclosure relates to a pollen grain or an ovule of the genetically altered plant of any of the above embodiments.

[0121] In some aspects, the present disclosure relates to a protoplast produced from the plant of any of the above embodiments.

[0122] In some aspects, the present disclosure relates to a tissue culture produced from protoplasts or cells from the plant of any of the above embodiments, wherein the cells or protoplasts are produced from a plant part selected from the group of leaf, anther, pistil, stem, petiole, root, root primordia, root tip, fruit, seed, flower, cotyledon, hypocotyl, embryo, or meristematic cell.

### Methods of Producing and Cultivating Genetically Altered Plants

[0123] Another aspect of the disclosure includes methods of producing the genetically altered plant of any of the above embodiments, including introducing a genetic alteration to the plant comprising the first nucleic acid sequence encoding the heterologous EPR3 or EPR3-like polypeptide. An additional embodiment of this aspect includes the first nucleic acid sequence being operably linked to a first promoter. Yet another embodiment of this aspect includes the first promoter being a root specific promoter, and the root specific promoter being optionally selected from the group of a NFR1 or NFR5/NFP promoter, an EPR3 or an EPR3a promoter, a Lotus NFR5 promoter, a Lotus NFR1 promoter, a maize allothioneine promoter, a chitinase promoter, a maize ZRP2 promoter, a tomato LeExt1 promoter, a glutamine synthetase soybean root promoter, a RCC3 promoter, a rice antiquitine promoter, a LRR receptor kinase promoter, or an Arabidopsis pCO2 promoter. Still another embodiment of this aspect includes the first promoter being a constitutive promoter, and the constitutive promoter being optionally selected from the group of a CaMV35S promoter, a derivative of the CaMV35S promoter, a maize ubiquitin promoter, a trefoil promoter, a vein mosaic cassava virus promoter, or an Arabidopsis UBQ10 promoter. An additional embodiment of this aspect further includes introducing a genetic alteration to the plant including the second nucleic acid sequence encoding the heterologous EPR3a or EPR3a-like polypeptide. A further embodiment of this aspect includes the second nucleic acid sequence being operably linked to a second promoter. Yet another embodiment of this aspect includes the second promoter being a root specific promoter, and the root specific promoter being optionally selected from the group of a NFR1 or NFR5/NFP promoter, an EPR3 or an EPR3a promoter, a Lotus NFR5 promoter, a Lotus NFR1 promoter, a maize allothioneine promoter, a chitinase promoter, a maize ZRP2 promoter, a tomato LeExt1 promoter, a glutamine synthetase soybean root promoter, a RCC3 promoter, a rice antiquitine promoter, a LRR receptor kinase promoter, or an Arabidopsis pCO2 promoter. Still another embodiment of this aspect includes the second promoter being a constitutive promoter, and the constitutive promoter being optionally selected from the group consisting of a CaMV35S promoter, a derivative of the CaMV35S promoter, a maize ubiquitin promoter, a trefoil promoter, a vein mosaic cassava virus promoter, or an Arabidopsis UBQ10 promoter. In a further embodiment of this aspect, with may be combined with any of the preceding embodiments, the first nucleic acid sequence is inserted into the genome of the plant so that the nucleic acid sequence is operably linked to a first endogenous promoter. An additional embodiment of this aspect includes the first endogenous promoter being a root specific promoter. In yet another embodiment of this aspect, with may be combined with any of the preceding embodiments that has the second nucleic acid sequence, the second nucleic acid sequence is inserted into the genome of the plant so that the nucleic acid sequence is operably linked to a second endogenous promoter. A further embodiment of this aspect includes the second endogenous promoter being a root specific promoter. Yet another embodiment of this aspect, which may be combined with any preceding embodiment that has the first nucleic acid sequence being inserted into the genome of the plant or the second nucleic acid sequence being inserted into the genome of the plant includes insertion resulting from the use of one or more gene editing components that target a nuclear genome sequence operably linked to an endogenous promoter. Still another embodiment of this aspect includes one or more gene editing components being selected from the group of a ribonucleoprotein complex that targets the nuclear genome sequence; a vector including a TALEN protein encoding sequence, wherein the TALEN protein targets the nuclear genome sequence; a vector including a ZFN protein encoding sequence, wherein the ZFN protein targets the nuclear genome sequence; an oligonucleotide donor (ODN), wherein the ODN targets the nuclear genome sequence; or a vector including a CRISPR/Cas enzyme encoding sequence and a targeting sequence, wherein the targeting sequence targets the nuclear genome sequence.

[0124] An additional aspect of the present disclosure relates to methods of producing the genetically altered plant of any one of the preceding embodiments that have a modified polypeptide, including genetically editing a gene encoding an endogenous LysM receptor polypeptide in the plant to comprise the modified ectodomain. In a further embodiment of this aspect, the endogenous LysM receptor polypeptide is an endogenous EPR3 or EPR3-like polypeptide. In another embodiment of this aspect, which may be combined with any of the preceding embodiments, the modified EPR3 or EPR3-like polypeptide was generated by: (a) providing a heterologous EPR3 or EPR3-like polypeptide model including a structural model, a molecular model, a surface characteristics model, and/or an electrostatic potential model of a M1 domain, a M2 domain, a LysM3 domain, any combination thereof, or the ectodomain of the heterologous EPR3 or EPR3-like polypeptide having selectivity for the beneficial commensal microbe and an unmodified EPR3 or EPR3-like polypeptide; (b) identifying one or more amino acid residues for modification in the unmodified EPR3 or EPR3-like polypeptide by comparing amino acid residues of a oligosaccharide binding feature in the unmodified EPR3 or EPR3-like polypeptide with the corresponding amino acid residues in the heterologous EPR3 or EPR3-like polypeptide model; and (c) generating the unmodified EPR3 or EPR3-like polypeptide wherein the one or more amino acid residues in the oligosaccharide binding feature of the unmodified EPR3 or EPR3-like polypeptide have been substituted with corresponding amino acid residues from the heterologous EPR3 or EPR3-like polypeptide. Selectivity may mean positive selection of the beneficial commensal microbe, negative selection of other microbes that are not the beneficial commensal, or a combination thereof. Yet another embodiment of this aspect includes the heterologous EPR3 or EPR3-like polypeptide model being a protein crystal structure, a molecular model, a cryo-EM structure, or a NMR structure. In an additional embodiment of this aspect, the endogenous LysM receptor polypeptide is an endogenous EPR3a or EPR3a-like polypeptide. In another embodiment of this aspect, the modified EPR3a or EPR3a-like polypeptide was generated by: (a) providing a heterologous EPR3a or EPR3a-like polypeptide model including a structural model, a molecular model, a surface characteristics model, and/or an electrostatic potential model of a M1 domain, a M2 domain, a LysM3 domain, any combination thereof, or the ectodomain of the heterologous EPR3a or EPR3a-like polypeptide having selectivity for the beneficial commensal microbe and an unmodified EPR3a or EPR3a-like polypeptide; (b) identifying one or more amino acid residues for modification in the unmodified EPR3a or EPR3a-like polypeptide by comparing amino acid residues of a oligosaccharide binding feature in the unmodified EPR3a or EPR3a-like polypeptide with the corresponding amino acid residues in the heterologous EPR3a or EPR3a-like polypeptide model; and (c) generating the unmodified EPR3a or EPR3a-like polypeptide wherein the one or more amino acid residues in the oligosaccharide binding feature of the unmodified EPR3a or EPR3a-like polypeptide have been substituted with corresponding amino acid residues from the heterologous EPR3a or EPR3a-like polypeptide. Selectivity may mean positive selection of the beneficial commensal microbe, negative selection of other microbes that are not the beneficial commensal, or a combination thereof. Yet another embodiment of this aspect includes the heterologous EPR3a or EPR3a-like polypeptide model being a protein crystal structure, a molecular model, a cryo-EM structure, or a NMR structure. A further embodiment of this aspect that can be combined with any of the preceding embodiments includes a plant or plant part produced by the method of any one of the preceding embodiments.

[0125] A further aspect of the present disclosure relates to methods of producing the genetically altered plant of any of the above embodiments, including introducing a genetic alteration to the plant comprising the first nucleic acid sequence encoding the heterologous EPR3a or EPR3a-like polypeptide. An additional embodiment of this aspect includes the first nucleic acid sequence being operably linked to a first promoter. Yet another embodiment of this aspect includes the first promoter being a root specific promoter, and the root specific promoter being optionally selected from the group of a NFR1 or NFR5/NFP promoter, an EPR3 or an EPR3a promoter, a Lotus NFR5 promoter, a Lotus NFR1 promoter, a maize allothioneine promoter, a chitinase promoter, a maize ZRP2 promoter, a tomato LeExt1 promoter, a glutamine synthetase soybean root promoter, a RCC3 promoter, a rice antiquitine promoter, a LRR receptor kinase promoter, or an Arabidopsis pCO2 promoter. Still another embodiment of this aspect includes the first promoter being a constitutive promoter, and the constitutive promoter being optionally selected from the group of a CaMV35S promoter, a derivative of the CaMV35S promoter, a maize ubiquitin promoter, a trefoil promoter, a vein mosaic cassava virus promoter, or an Arabidopsis UBQ10 promoter. An additional embodiment of this aspect further includes introducing a genetic alteration to the plant including the second nucleic acid sequence encoding the heterologous EPR3 or EPR3-like polypeptide. A further embodiment of this aspect includes the second nucleic acid sequence being operably linked to a second promoter. Yet another embodiment of this aspect includes the second promoter being a root specific promoter, and the root specific promoter being optionally selected from the group of a NFR1 or NFR5/NFP promoter, an EPR3 or an EPR3a promoter, a Lotus NFR5 promoter, a Lotus NFR1 promoter, a maize allothioneine promoter, a chitinase promoter, a maize ZRP2 promoter, a tomato LeExt1 promoter, a glutamine synthetase soybean root promoter, a RCC3 promoter, a rice antiquitine promoter, a LRR receptor kinase promoter, or an Arabidopsis pCO2 promoter. Still another embodiment of this aspect includes the second promoter being a constitutive promoter, and the constitutive promoter being optionally selected from the group consisting of a CaMV35S promoter, a derivative of the CaMV35S promoter, a maize ubiquitin promoter, a trefoil promoter, a vein mosaic cassava virus promoter, or an Arabidopsis UBQ10 promoter. In a further embodiment of this aspect, with may be combined with any of the preceding embodiments, the first nucleic acid sequence is inserted into the genome of the plant so that the nucleic acid sequence is operably linked to a first endogenous promoter. An additional embodiment of this aspect includes the first endogenous promoter being a root specific promoter. In yet another embodiment of this aspect, with may be combined with any of the preceding embodiments that has the second nucleic acid sequence, the second nucleic acid sequence is inserted into the genome of the plant so that the nucleic acid sequence is operably linked to a second endogenous promoter. A further embodiment of this aspect includes the second endogenous promoter being a root specific promoter. Yet another embodiment of this aspect, which may be combined with any preceding embodiment that has the first nucleic acid sequence being inserted into the genome of the plant or the second nucleic acid sequence being inserted into the genome of the plant includes insertion resulting from the use of one or more gene editing components that target a nuclear genome sequence operably linked to an endogenous promoter. Still another embodiment of this aspect includes one or more gene editing components being selected from the group of a ribonucleoprotein complex that targets the nuclear genome sequence; a vector including a TALEN protein encoding sequence, wherein the TALEN protein targets the nuclear genome sequence; a vector including a ZFN protein encoding sequence, wherein the ZFN protein targets the nuclear genome sequence; an oligonucleotide donor (ODN), wherein the ODN targets the nuclear genome sequence; or a vector including a CRISPR/Cas enzyme encoding sequence and a targeting sequence, wherein the targeting sequence targets the nuclear genome sequence.

[0126] An additional aspect of the present disclosure relates to methods of producing the genetically altered plant of any one of the preceding embodiments that have a modified polypeptide, including genetically editing a gene encoding an endogenous LysM receptor polypeptide in the plant to comprise the modified ectodomain. In a further embodiment of this aspect, the endogenous LysM receptor polypeptide is an endogenous EPR3a or an EPR3a-like polypeptide. In another embodiment of this aspect, which may be combined with any of the preceding embodiments, the modified EPR3a or EPR3a-like polypeptide was generated by: (a) providing a heterologous EPR3a or EPR3a-like polypeptide model including a structural model, a molecular model, a surface characteristics model, and/or an electrostatic potential model of a M1 domain, a M2 domain, a LysM3 domain, any combination thereof, or the ectodomain of the heterologous EPR3a or EPR3a-like polypeptide having selectivity for the beneficial commensal microbe and an unmodified EPR3a or EPR3a-like polypeptide; (b) identifying one or more amino acid residues for modification in the unmodified EPR3a or EPR3a-like polypeptide by comparing amino acid residues of a oligosaccharide binding feature in the unmodified EPR3a or EPR3a-like polypeptide with the corresponding amino acid residues in the heterologous EPR3a or EPR3a-like polypeptide model; and (c) generating the unmodified EPR3a or EPR3a-like polypeptide wherein the one or more amino acid residues in the oligosaccharide binding feature of the unmodified EPR3a or EPR3a-like polypeptide have been substituted with corresponding amino acid residues from the heterologous EPR3a or EPR3a-like polypeptide. Selectivity may mean positive selection of the beneficial commensal microbe, negative selection of other microbes that are not the beneficial commensal, or a combination thereof. Yet another embodiment of this aspect includes the heterologous EPR3a or EPR3a-like polypeptide model being a protein crystal structure, a molecular model, a cryo-EM structure, or a NMR structure. In an additional embodiment of this aspect, the endogenous LysM receptor polypeptide is an endogenous EPR3 or EPR3-like polypeptide. In another embodiment of this aspect, the modified EPR3 or EPR3-like polypeptide was generated by: (a) providing a heterologous EPR3 or EPR3-like polypeptide model including a structural model, a molecular model, a surface characteristics model, and/or an electrostatic potential model of a M1 domain, a M2 domain, a LysM3 domain, any combination thereof, or the ectodomain of the heterologous EPR3 or EPR3-like polypeptide having selectivity for the beneficial commensal microbe and an unmodified EPR3 or EPR3-like polypeptide; (b) identifying one or more amino acid residues for modification in the unmodified EPR3 or EPR3-like polypeptide by comparing amino acid residues of a oligosaccharide binding feature in the unmodified EPR3 or EPR3-like polypeptide with the corresponding amino acid residues in the heterologous EPR3 or EPR3-like polypeptide model; and (c) generating the unmodified EPR3 or EPR3-like polypeptide wherein the one or more amino acid residues in the oligosaccharide binding feature of the unmodified EPR3 or EPR3-like polypeptide have been substituted with corresponding amino acid residues from the heterologous EPR3 or EPR3-like polypeptide. Selectivity may mean positive selection of the beneficial commensal microbe, negative selection of other microbes that are not the beneficial commensal, or a combination thereof. Yet another embodiment of this aspect includes the heterologous EPR3 or EPR3-like polypeptide model being a protein crystal structure, a molecular model, a cryo-EM structure, or a NMR structure. A further embodiment of this aspect that can be combined with any of the preceding embodiments includes a plant or plant part produced by the method of any one of the preceding embodiments.

[0127] Yet another aspect of the disclosure includes methods of cultivating the genetically altered plant of any of the preceding embodiments that has a genetically altered plant, including the steps of: a) planting a genetically altered seedling, a genetically altered plantlet, a genetically altered cutting, a genetically altered tuber, a genetically altered root, or a genetically altered seed in soil to produce the genetically altered plant or grafting the genetically altered seedling, the genetically altered plantlet, or the genetically altered cutting to a root stock or a second plant grown in soil to produce the genetically altered plant; b) cultivating the plant to produce harvestable seed, harvestable leaves, harvestable roots, harvestable cuttings, harvestable wood, harvestable fruit, harvestable kernels, harvestable tubers, and/or harvestable grain; and harvesting the harvestable seed, harvestable leaves, harvestable roots, harvestable cuttings, harvestable wood, harvestable fruit, harvestable kernels, harvestable tubers, and/or harvestable grain; and c) harvesting the harvestable seed, harvestable leaves, harvestable roots, harvestable cuttings, harvestable wood, harvestable fruit, harvestable kernels, harvestable tubers, and/or harvestable grain.

Methods of Identifying a Beneficial Commensal Microbe Yet another aspect of the present disclosure relates to methods of identifying a beneficial commensal microbe capable of participating in a plant root microbiota including: a) providing a first polypeptide including an EPR3 or EPR3-like polypeptide, an ectodomain of an EPR3 or EPR3-like polypeptide, a M1 domain of an EPR3 or EPR3-like polypeptide, a M2 domain of an EPR3 or EPR3-like polypeptide, or a LysM3 domain of an EPR3 or EPR3-like polypeptide of the plant; b) contacting the first polypeptide with a sample including a microbe or an EPS, a beta-glucan, a cyclic beta-glucan, a LPS, or a surface carbohydrate produced by the microbe; and c) detecting binding of the EPS, the beta-glucan, the cyclic beta-glucan, the LPS, or the surface carbohydrate produced by the microbe to the polypeptide, wherein binding of the EPS, the beta-glucan, the cyclic beta-glucan, the LPS, or the surface carbohydrate to the polypeptide indicates that the microbe is a beneficial commensal microbe capable of participating in a plant root microbiota; optionally, detecting enrichment of taxa in Burkholderiales and/or Rhizobiales in a plant rhizosphere or endosphere, wherein enrichment of taxa in Burkholderiales and/or Rhizobiales in the plant rhizosphere or endosphere indicates that the microbe is a beneficial commensal microbe capable of participating in a plant root microbiota; optionally, the detecting is by a functional assay optionally selected from (i) detecting enrichment of taxa in Burkholderiales and/or Rhizobiales in a plant rhizosphere or endosphere, wherein enrichment of taxa in Burkholderiales and/or Rhizobiales in the plant rhizosphere or endosphere indicates that the microbe is a beneficial commensal microbe capable of participating in a plant root microbiota; optionally, (ii) detecting nodulation in a plant root system, wherein nodulation indicates that the microbe is a beneficial commensal microbe capable of participating in a plant root microbiota; and/or (iii) detecting mycorrhization in a plant root system, wherein mycorrhization indicates that the microbe is a beneficial commensal microbe capable of participating in a plant root microbiota, or optionally the detecting is by a direct binding assay optionally selected from (1) a competition assay optionally with a known signaling saccharide, or (2) an affinity assay optionally wherein the detected affinity is compared to the affinity for the known signaling saccharide. A further embodiment of this aspect further includes providing a second polypeptide including an EPR3a or EPR3a-like polypeptide, an ectodomain of an EPR3a or EPR3a-like polypeptide, a M1 domain of an EPR3a or EPR3a-like polypeptide, a M2 domain of an EPR3a or EPR3a-like polypeptide, or a LysM3 domain of an EPR3a or EPR3a-like polypeptide of the plant of the plant in step (a), wherein the second polypeptide is in contact with the first polypeptide. An additional embodiment of this aspect further includes step (d) culturing the beneficial commensal microbe if binding is detected in step (c). Yet another embodiment of this aspect further includes step (e) applying the beneficial commensal microbe to the plant or a part thereof. A further embodiment of this aspect includes the plant part being a plant propagation material, optionally a seed, a tuber, or a plantlet, and the beneficial commensal microbe being applied to the plant propagation material, optionally to the seed as part of a seed coating, to the tuber, or to a root of the plantlet. An additional embodiment of this aspect includes the plant part being a plant vegetative or reproductive material, optionally a root, a shoot, a stem, a pollen grain, or an ovule, and the beneficial commensal microbe is applied to the plant vegetative or reproductive material of the plant, optionally as part of a coating, a solution, or a powder. Still another embodiment of this aspect further includes step (e) applying the beneficial commensal microbe, optionally in admixture with a soil-compatible carrier, a fungal carrier, or a growth medium, optionally soil, where the plant is growing or is to be grown. Yet another embodiment of this aspect, which may be combined with any of the preceding embodiments having an ectodomain of an EPR3 or EPR3-like polypeptide, includes the ectodomain of the EPR3 or EPR3-like polypeptide having at least 70% sequence identity, at least 71% sequence identity, at least 72% sequence identity, at least 73% sequence identity, at least 74% sequence identity, at least 75% sequence identity, at least 76% sequence identity, at least 77% sequence identity, at least 78% sequence identity, at least 79% sequence identity, at least 80% sequence identity, at least 81% sequence identity, at least 82% sequence identity, at least 83% sequence identity, at least 84% sequence identity, at least 85% sequence identity, at least 86% sequence identity, at least 87% sequence identity, at least 88% sequence identity, at least 89% sequence identity, at least 90% sequence identity, at least 91% sequence identity, at least 92% sequence identity, at least 93% sequence identity, at least 94% sequence identity, at least 95% sequence identity, at least 96% sequence identity, at least 97% sequence identity, at least 98% sequence identity, or at least 99% sequence identity to the ectodomain of SEQ ID NO: 1 [L. japonicus (EPR3)], SEQ ID NO: 2 [Chickpea (XP_004489790.1)], SEQ ID NO: 3 [Medicago (XP_003613165.1)], SEQ ID NO: 4 [Soybean (XP_003517716.1)], SEQ ID NO: 5 [Phaseolus (XP_007157313.1)], SEQ ID NO: 6 [Populus (XP_002322185.1)], SEQ ID NO: 7 [Malus (XP_008340354.1)], SEQ ID NO: 8 [Vitis (XP_002272814.2)], SEQ ID NO: 9 [Theobroma (XP_007036352.1)], SEQ ID NO: 10 [Ricinus (XP_002527912.1)], SEQ ID NO: 11 [Fragaria (XP_004300916.1)], SEQ ID NO: 12 [Maize (XP_008657477.1)], SEQ ID NO: 13 [Rice (XP_015628733.1)], SEQ ID NO: 14 [Wheat (CDM80098.1)], or SEQ ID NO: 15 [Barley (MLOC_5489.2)]. An additional embodiment of this aspect, which may be combined with any of the preceding embodiments having an ectodomain of an EPR3 or EPR3-like polypeptide, includes the ectodomain of the EPR3 or EPR3-like polypeptide being the ectodomain of SEQ ID NO: 1 [L. japonicus (EPR3)], SEQ ID NO: 2 [Chickpea (XP_004489790.1)], SEQ ID NO: 3 [Medicago (XP_003613165.1)], SEQ ID NO: 4 [Soybean (XP_003517716.1)], SEQ ID NO: 5 [Phaseolus (XP_007157313.1)], SEQ ID NO: 6 [Populus (XP_002322185.1)], SEQ ID NO: 7 [Malus (XP_008340354.1)], SEQ ID NO: 8 [Vitis (XP_002272814.2)], SEQ ID NO: 9 [Theobroma (XP_007036352.1)], SEQ ID NO: 10 [Ricinus (XP_002527912.1)], SEQ ID NO: 11 [Fragaria (XP_004300916.1)], SEQ ID NO: 12 [Maize (XP_008657477.1)], SEQ ID NO: 13 [Rice (XP_015628733.1)], SEQ ID NO: 14 [Wheat (CDM80098.1)], or SEQ ID NO: 15 [Barley (MLOC_5489.2)]. A further embodiment of this aspect, which may be combined with any of the preceding embodiments having an ectodomain of an EPR3a or EPR3a-like polypeptide, includes the ectodomain of the EPR3a or EPR3a-like polypeptide having at least 70% sequence identity, at least 71% sequence identity, at least 72% sequence identity, at least 73% sequence identity, at least 74% sequence identity, at least 75% sequence identity, at least 76% sequence identity, at least 77% sequence identity, at least 78% sequence identity, at least 79% sequence identity, at least 80% sequence identity, at least 81% sequence identity, at least 82% sequence identity, at least 83% sequence identity, at least 84% sequence identity, at least 85% sequence identity, at least 86% sequence identity, at least 87% sequence identity, at least 88% sequence identity, at least 89% sequence identity, at least 90% sequence identity, at least 91% sequence identity, at least 92% sequence identity, at least 93% sequence identity, at least 94% sequence identity, at least 95% sequence identity, at least 96% sequence identity, at least 97% sequence identity, at least 98% sequence identity, or at least 99% sequence identity to the ectodomain of SEQ ID NO: 62 [L. japonicus (EPR3a)], SEQ ID NO: 63, SEQ ID NO: 64, SEQ ID NO: 65, SEQ ID NO: 66, SEQ ID NO: 67, SEQ ID NO: 68, SEQ ID NO: 69, SEQ ID NO: 70, SEQ ID NO: 71, SEQ ID NO: 72, SEQ ID NO: 73, SEQ ID NO: 74, SEQ ID NO: 75, SEQ ID NO: 76, SEQ ID NO: 77, SEQ ID NO: 78, SEQ ID NO: 79, SEQ ID NO: 80, SEQ ID NO: 81, SEQ ID NO: 82, SEQ ID NO: 83, SEQ ID NO: 84, SEQ ID NO: 85, SEQ ID NO: 86, SEQ ID NO: 87, SEQ ID NO: 88, SEQ ID NO: 89, SEQ ID NO: 90, SEQ ID NO: 91, or SEQ ID NO: 92. Yet another embodiment of this aspect, which may be combined with any of the preceding embodiments having an ectodomain of an EPR3a or EPR3a-like polypeptide, includes the ectodomain of the EPR3a or EPR3a-like polypeptide being the ectodomain of SEQ ID NO: 62 [L. japonicus (EPR3a)], SEQ ID NO: 63, SEQ ID NO: 64, SEQ ID NO: 65, SEQ ID NO: 66, SEQ ID NO: 67, SEQ ID NO: 68, SEQ ID NO: 69, SEQ ID NO: 70, SEQ ID NO: 71, SEQ ID NO: 72, SEQ ID NO: 73, SEQ ID NO: 74, SEQ ID NO: 75, SEQ ID NO: 76, SEQ ID NO: 77, SEQ ID NO: 78, SEQ ID NO: 79, SEQ ID NO: 80, SEQ ID NO: 81, SEQ ID NO: 82, SEQ ID NO: 83, SEQ ID NO: 84, SEQ ID NO: 85, SEQ ID NO: 86, SEQ ID NO: 87, SEQ ID NO: 88, SEQ ID NO: 89, SEQ ID NO: 90, SEQ ID NO: 91, or SEQ ID NO: 92. Still another embodiment of this aspect includes beneficial commensal microbe being a commensal bacteria, optionally a nitrogen-fixing bacteria, or a mycorrhizal fungi.

[0128] Still another aspect of the present disclosure relates to methods of identifying a beneficial commensal microbe capable of participating in a plant root microbiota including: a) providing a first polypeptide including an EPR3a or EPR3a-like polypeptide, an ectodomain of an EPR3a or EPR3a-like polypeptide, a M1 domain of an EPR3a or EPR3a-like polypeptide, a M2 domain of an EPR3a or EPR3a-like polypeptide, or a LysM3 domain of an EPR3a or EPR3a-like polypeptide of the plant; b) contacting the first polypeptide with a sample including a microbe or an EPS, a beta-glucan, a cyclic beta-glucan, a LPS, or a surface carbohydrate produced by the microbe; and c) detecting binding of the EPS, the beta-glucan, the cyclic beta-glucan, the LPS, or the surface carbohydrate produced by the microbe to the polypeptide, wherein binding of the EPS, the beta-glucan, the cyclic beta-glucan, the LPS, or the surface carbohydrate to the polypeptide indicates that the microbe is a beneficial commensal microbe capable of participating in a plant root microbiota; optionally, detecting enrichment of taxa in Burkholderiales and/or Rhizobiales in a plant rhizosphere or endosphere, wherein enrichment of taxa in Burkholderiales and/or Rhizobiales in the plant rhizosphere or endosphere indicates that the microbe is a beneficial commensal microbe capable of participating in a plant root microbiota; optionally, the detecting is by a functional assay optionally selected from (i) detecting enrichment of taxa in Burkholderiales and/or Rhizobiales in a plant rhizosphere or endosphere, wherein enrichment of taxa in Burkholderiales and/or Rhizobiales in the plant rhizosphere or endosphere indicates that the microbe is a beneficial commensal microbe capable of participating in a plant root microbiota; optionally, (ii) detecting nodulation in a plant root system, wherein nodulation indicates that the microbe is a beneficial commensal microbe capable of participating in a plant root microbiota; and/or (iii) detecting mycorrhization in a plant root system, wherein mycorrhization indicates that the microbe is a beneficial commensal microbe capable of participating in a plant root microbiota, or optionally the detecting is by a direct binding assay optionally selected from (1) a competition assay optionally with a known signaling saccharide, or (2) an affinity assay optionally wherein the detected affinity is compared to the affinity for the known signaling saccharide. A further embodiment of this aspect further includes providing a second polypeptide including an EPR3 or EPR3-like polypeptide, an ectodomain of an EPR3 or EPR3-like polypeptide, a M1 domain of an EPR3 or EPR3-like polypeptide, a M2 domain of an EPR3 or EPR3-like polypeptide, or a LysM3 domain of an EPR3 or EPR3-like polypeptide of the plant in step (a), wherein the second polypeptide is in contact with the first polypeptide. An additional embodiment of this aspect further includes step (d) culturing the beneficial commensal microbe if binding is detected in step (c). Yet another embodiment of this aspect further includes step (e) applying the beneficial commensal microbe to the plant or a part thereof. A further embodiment of this aspect includes the plant part being a plant propagation material, optionally a seed, a tuber, or a plantlet, and the beneficial commensal microbe being applied to the plant propagation material, optionally to the seed as part of a seed coating, to the tuber, or to a root of the plantlet. An additional embodiment of this aspect includes the plant part being a plant vegetative or reproductive material, optionally a root, a shoot, a stem, a pollen grain, or an ovule, and the beneficial commensal microbe is applied to the plant vegetative or reproductive material of the plant, optionally as part of a coating, a solution, or a powder. Still another embodiment of this aspect further includes step (e) applying the beneficial commensal microbe, optionally in admixture with a soil-compatible carrier, a fungal carrier, or a growth medium, optionally soil, where the plant is growing or is to be grown. A further embodiment of this aspect, which may be combined with any of the preceding embodiments having an ectodomain of an EPR3a or EPR3a-like polypeptide, includes the ectodomain of the EPR3a or EPR3a-like polypeptide having at least 70% sequence identity, at least 71% sequence identity, at least 72% sequence identity, at least 73% sequence identity, at least 74% sequence identity, at least 75% sequence identity, at least 76% sequence identity, at least 77% sequence identity, at least 78% sequence identity, at least 79% sequence identity, at least 80% sequence identity, at least 81% sequence identity, at least 82% sequence identity, at least 83% sequence identity, at least 84% sequence identity, at least 85% sequence identity, at least 86% sequence identity, at least 87% sequence identity, at least 88% sequence identity, at least 89% sequence identity, at least 90% sequence identity, at least 91% sequence identity, at least 92% sequence identity, at least 93% sequence identity, at least 94% sequence identity, at least 95% sequence identity, at least 96% sequence identity, at least 97% sequence identity, at least 98% sequence identity, or at least 99% sequence identity to the ectodomain of SEQ ID NO: 62 [L. japonicus (EPR3a)], SEQ ID NO: 63, SEQ ID NO: 64, SEQ ID NO: 65, SEQ ID NO: 66, SEQ ID NO: 67, SEQ ID NO: 68, SEQ ID NO: 69, SEQ ID NO: 70, SEQ ID NO: 71, SEQ ID NO: 72, SEQ ID NO: 73, SEQ ID NO: 74, SEQ ID NO: 75, SEQ ID NO: 76, SEQ ID NO: 77, SEQ ID NO: 78, SEQ ID NO: 79, SEQ ID NO: 80, SEQ ID NO: 81, SEQ ID NO: 82, SEQ ID NO: 83, SEQ ID NO: 84, SEQ ID NO: 85, SEQ ID NO: 86, SEQ ID NO: 87, SEQ ID NO: 88, SEQ ID NO: 89, SEQ ID NO: 90, SEQ ID NO: 91, or SEQ ID NO: 92. Yet another embodiment of this aspect, which may be combined with any of the preceding embodiments having an ectodomain of an EPR3a or EPR3a-like polypeptide, includes the ectodomain of the EPR3a or EPR3a-like polypeptide being the ectodomain of SEQ ID NO: 62 [L. japonicus (EPR3a)], SEQ ID NO: 63, SEQ ID NO: 64, SEQ ID NO: 65, SEQ ID NO: 66, SEQ ID NO: 67, SEQ ID NO: 68, SEQ ID NO: 69, SEQ ID NO: 70, SEQ ID NO: 71, SEQ ID NO: 72, SEQ ID NO: 73, SEQ ID NO: 74, SEQ ID NO: 75, SEQ ID NO: 76, SEQ ID NO: 77, SEQ ID NO: 78, SEQ ID NO: 79, SEQ ID NO: 80, SEQ ID NO: 81, SEQ ID NO: 82, SEQ ID NO: 83, SEQ ID NO: 84, SEQ ID NO: 85, SEQ ID NO: 86, SEQ ID NO: 87, SEQ ID NO: 88, SEQ ID NO: 89, SEQ ID NO: 90, SEQ ID NO: 91, or SEQ ID NO: 92. Yet another embodiment of this aspect, which may be combined with any of the preceding embodiments having an ectodomain of an EPR3 or EPR3-like polypeptide, includes the ectodomain of the EPR3 or EPR3-like polypeptide having at least 70% sequence identity, at least 71% sequence identity, at least 72% sequence identity, at least 73% sequence identity, at least 74% sequence identity, at least 75% sequence identity, at least 76% sequence identity, at least 77% sequence identity, at least 78% sequence identity, at least 79% sequence identity, at least 80% sequence identity, at least 81% sequence identity, at least 82% sequence identity, at least 83% sequence identity, at least 84% sequence identity, at least 85% sequence identity, at least 86% sequence identity, at least 87% sequence identity, at least 88% sequence identity, at least 89% sequence identity, at least 90% sequence identity, at least 91% sequence identity, at least 92% sequence identity, at least 93% sequence identity, at least 94% sequence identity, at least 95% sequence identity, at least 96% sequence identity, at least 97% sequence identity, at least 98% sequence identity, or at least 99% sequence identity to the ectodomain of SEQ ID NO: 1 [L. japonicus (EPR3)], SEQ ID NO: 2 [Chickpea (XP_004489790.1)], SEQ ID NO: 3 [Medicago (XP_003613165.1)], SEQ ID NO: 4 [Soybean (XP_003517716.1)], SEQ ID NO: 5 [Phaseolus (XP_007157313.1)], SEQ ID NO: 6 [Populus (XP_002322185.1)], SEQ ID NO: 7 [Malus (XP_008340354.1)], SEQ ID NO: 8 [Vitis (XP_002272814.2)], SEQ ID NO: 9 [Theobroma (XP_007036352.1)], SEQ ID NO: 10 [Ricinus (XP_002527912.1)], SEQ ID NO: 11 [Fragaria (XP_004300916.1)], SEQ ID NO: 12 [Maize (XP_008657477.1)], SEQ ID NO: 13 [Rice (XP_015628733.1)], SEQ ID NO: 14 [Wheat (CDM80098.1)], or SEQ ID NO: 15 [Barley (MLOC_5489.2)]. An additional embodiment of this aspect, which may be combined with any of the preceding embodiments having an ectodomain of an EPR3 or EPR3-like polypeptide, includes the ectodomain of the EPR3 or EPR3-like polypeptide being the ectodomain of SEQ ID NO: 1 [L. japonicus (EPR3)], SEQ ID NO: 2 [Chickpea (XP_004489790.1)], SEQ ID NO: 3 [Medicago (XP_003613165.1)], SEQ ID NO: 4 [Soybean (XP_003517716.1)], SEQ ID NO: 5 [Phaseolus (XP_007157313.1)], SEQ ID NO: 6 [Populus (XP_002322185.1)], SEQ ID NO: 7 [Malus (XP_008340354.1)], SEQ ID NO: 8 [Vitis (XP_002272814.2)], SEQ ID NO: 9 [Theobroma (XP_007036352.1)], SEQ ID NO: 10 [Ricinus (XP_002527912.1)], SEQ ID NO: 11 [Fragaria (XP_004300916.1)], SEQ ID NO: 12 [Maize (XP_008657477.1)], SEQ ID NO: 13 [Rice (XP_015628733.1)], SEQ ID NO: 14 [Wheat (CDM80098.1)], or SEQ ID NO: 15 [Barley (MLOC_5489.2)]. Still another embodiment of this aspect includes the beneficial commensal microbe being commensal bacteria, optionally a nitrogen-fixing bacteria, or a mycorrhizal fungi.

### Molecular Biological Methods to Produce Genetically Altered Plants and Plant Cells

[0129] One embodiment of the present invention provides a genetically altered plant or plant cell containing a first nucleic acid sequence encoding a heterologous EPR3 or EPR3-like polypeptide or a modified EPR3 or EPR3-like polypeptide, and optionally containing a second nucleic acid sequence encoding a heterologous EPR3a or EPR3a-like polypeptide or a modified EPR3a or EPR3a-like polypeptide, for increased selectivity for a beneficial commensal microbe as compared to a wild-type plant under the same conditions. Another embodiment of the present invention provides a genetically altered plant or plant cell containing a first nucleic acid sequence encoding a heterologous EPR3a or EPR3a-like polypeptide or a modified EPR3a or EPR3a-like polypeptide, and optionally containing a second nucleic acid sequence encoding a heterologous EPR3 or EPR3-like polypeptide or a modified EPR3 or EPR3-like polypeptide, for increased selectivity for a beneficial commensal microbe as compared to a wild-type plant under the same conditions. Selectivity may mean positive selection of the beneficial commensal microbe, negative selection of other microbes that are not the beneficial commensal, or a combination thereof.

[0130] Certain aspects of the present invention relate to the L. japonicus protein EPR3 (SEQ ID NO: 61). EPR3 is a single-pass transmembrane receptor kinase that has an ectodomain with a globular portion and a stalk portion (FIG. 3D), a transmembrane domain, and a kinase domain (FIG. 3E). The EPR3 ectodomain has three domains, M1, M2, and LysM3, each of which contain specific α-helix and β-sheet secondary structures (FIG. 2A). Further aspects of the present disclosure relate to homologs or orthologs of EPR3 (e.g., EPR3-like proteins). In some embodiments, a homolog or ortholog is structurally similar to L. japonicus EPR3. As shown in FIGS. 4A-4C, other plant species have proteins homologous to L. japonicus EPR3 with the same M1, M2 and LysM3 regions containing specific α-helix and β-sheet secondary structures.

[0131] A heterologous EPR3 or EPR3-like polypeptide of the present disclosure includes an EPR3 or EPR3-like polypeptide from a dicot (legume or non-legume) plant species or a monocot plant species. An additional embodiment of this aspect includes the heterologous EPR3 or EPR3-like polypeptide being selected from the group of a first polypeptide with at least 70% sequence identity, at least 71% sequence identity, at least 72% sequence identity, at least 73% sequence identity, at least 74% sequence identity, at least 75% sequence identity, at least 76% sequence identity, at least 77% sequence identity, at least 78% sequence identity, at least 79% sequence identity, at least 80% sequence identity, at least 81% sequence identity, at least 82% sequence identity, at least 83% sequence identity, at least 84% sequence identity, at least 85% sequence identity, at least 86% sequence identity, at least 87% sequence identity, at least 88% sequence identity, at least 89% sequence identity, at least 90% sequence identity, at least 91% sequence identity, at least 92% sequence identity, at least 93% sequence identity, at least 94% sequence identity, at least 95% sequence identity, at least 96% sequence identity, at least 97% sequence identity, at least 98% sequence identity, or at least 99% sequence identity to SEQ ID NO: 1 [L. japonicus (BAI79269.1)], a second polypeptide with at least 70% sequence identity, at least 71% sequence identity, at least 72% sequence identity, at least 73% sequence identity, at least 74% sequence identity, at least 75% sequence identity, at least 76% sequence identity, at least 77% sequence identity, at least 78% sequence identity, at least 79% sequence identity, at least 80% sequence identity, at least 81% sequence identity, at least 82% sequence identity, at least 83% sequence identity, at least 84% sequence identity, at least 85% sequence identity, at least 86% sequence identity, at least 87% sequence identity, at least 88% sequence identity, at least 89% sequence identity, at least 90% sequence identity, at least 91% sequence identity, at least 92% sequence identity, at least 93% sequence identity, at least 94% sequence identity, at least 95% sequence identity, at least 96% sequence identity, at least 97% sequence identity, at least 98% sequence identity, or at least 99% sequence identity to SEQ ID NO: 2 [Chickpea (XP_004489790.1)], a third polypeptide with at least 70% sequence identity, at least 71% sequence identity, at least 72% sequence identity, at least 73% sequence identity, at least 74% sequence identity, at least 75% sequence identity, at least 76% sequence identity, at least 77% sequence identity, at least 78% sequence identity, at least 79% sequence identity, at least 80% sequence identity, at least 81% sequence identity, at least 82% sequence identity, at least 83% sequence identity, at least 84% sequence identity, at least 85% sequence identity, at least 86% sequence identity, at least 87% sequence identity, at least 88% sequence identity, at least 89% sequence identity, at least 90% sequence identity, at least 91% sequence identity, at least 92% sequence identity, at least 93% sequence identity, at least 94% sequence identity, at least 95% sequence identity, at least 96% sequence identity, at least 97% sequence identity, at least 98% sequence identity, or at least 99% sequence identity to SEQ ID NO: 3 [Medicago (XP_003613165.1)], a fourth polypeptide with at least 70% sequence identity, at least 71% sequence identity, at least 72% sequence identity, at least 73% sequence identity, at least 74% sequence identity, at least 75% sequence identity, at least 76% sequence identity, at least 77% sequence identity, at least 78% sequence identity, at least 79% sequence identity, at least 80% sequence identity, at least 81% sequence identity, at least 82% sequence identity, at least 83% sequence identity, at least 84% sequence identity, at least 85% sequence identity, at least 86% sequence identity, at least 87% sequence identity, at least 88% sequence identity, at least 89% sequence identity, at least 90% sequence identity, at least 91% sequence identity, at least 92% sequence identity, at least 93% sequence identity, at least 94% sequence identity, at least 95% sequence identity, at least 96% sequence identity, at least 97% sequence identity, at least 98% sequence identity, or at least 99% sequence identity to SEQ ID NO: 4 [Soybean (XP_003517716.1)], a fifth polypeptide with at least 70% sequence identity, at least 71% sequence identity, at least 72% sequence identity, at least 73% sequence identity, at least 74% sequence identity, at least 75% sequence identity, at least 76% sequence identity, at least 77% sequence identity, at least 78% sequence identity, at least 79% sequence identity, at least 80% sequence identity, at least 81% sequence identity, at least 82% sequence identity, at least 83% sequence identity, at least 84% sequence identity, at least 85% sequence identity, at least 86% sequence identity, at least 87% sequence identity, at least 88% sequence identity, at least 89% sequence identity, at least 90% sequence identity, at least 91% sequence identity, at least 92% sequence identity, at least 93% sequence identity, at least 94% sequence identity, at least 95% sequence identity, at least 96% sequence identity, at least 97% sequence identity, at least 98% sequence identity, or at least 99% sequence identity to SEQ ID NO: 5 [Phaseolus (XP_007157313.1)], a sixth polypeptide with at least 70% sequence identity, at least 71% sequence identity, at least 72% sequence identity, at least 73% sequence identity, at least 74% sequence identity, at least 75% sequence identity, at least 76% sequence identity, at least 77% sequence identity, at least 78% sequence identity, at least 79% sequence identity, at least 80% sequence identity, at least 81% sequence identity, at least 82% sequence identity, at least 83% sequence identity, at least 84% sequence identity, at least 85% sequence identity, at least 86% sequence identity, at least 87% sequence identity, at least 88% sequence identity, at least 89% sequence identity, at least 90% sequence identity, at least 91% sequence identity, at least 92% sequence identity, at least 93% sequence identity, at least 94% sequence identity, at least 95% sequence identity, at least 96% sequence identity, at least 97% sequence identity, at least 98% sequence identity, or at least 99% sequence identity to SEQ ID NO: 6 [Populus (XP_002322185.1)], a seventh polypeptide with at least 70% sequence identity, at least 71% sequence identity, at least 72% sequence identity, at least 73% sequence identity, at least 74% sequence identity, at least 75% sequence identity, at least 76% sequence identity, at least 77% sequence identity, at least 78% sequence identity, at least 79% sequence identity, at least 80% sequence identity, at least 81% sequence identity, at least 82% sequence identity, at least 83% sequence identity, at least 84% sequence identity, at least 85% sequence identity, at least 86% sequence identity, at least 87% sequence identity, at least 88% sequence identity, at least 89% sequence identity, at least 90% sequence identity, at least 91% sequence identity, at least 92% sequence identity, at least 93% sequence identity, at least 94% sequence identity, at least 95% sequence identity, at least 96% sequence identity, at least 97% sequence identity, at least 98% sequence identity, or at least 99% sequence identity to SEQ ID NO: 7 [Malta (XP_008340354.1)], an eighth polypeptide with at least 70% sequence identity, at least 71% sequence identity, at least 72% sequence identity, at least 73% sequence identity, at least 74% sequence identity, at least 75% sequence identity, at least 76% sequence identity, at least 77% sequence identity, at least 78% sequence identity, at least 79% sequence identity, at least 80% sequence identity, at least 81% sequence identity, at least 82% sequence identity, at least 83% sequence identity, at least 84% sequence identity, at least 85% sequence identity, at least 86% sequence identity, at least 87% sequence identity, at least 88% sequence identity, at least 89% sequence identity, at least 90% sequence identity, at least 91% sequence identity, at least 92% sequence identity, at least 93% sequence identity, at least 94% sequence identity, at least 95% sequence identity, at least 96% sequence identity, at least 97% sequence identity, at least 98% sequence identity, or at least 99% sequence identity to SEQ ID NO: 8 [Vitis (XP_002272814.2)], a ninth polypeptide with at least 70% sequence identity, at least 71% sequence identity, at least 72% sequence identity, at least 73% sequence identity, at least 74% sequence identity, at least 75% sequence identity, at least 76% sequence identity, at least 77% sequence identity, at least 78% sequence identity, at least 79% sequence identity, at least 80% sequence identity, at least 81% sequence identity, at least 82% sequence identity, at least 83% sequence identity, at least 84% sequence identity, at least 85% sequence identity, at least 86% sequence identity, at least 87% sequence identity, at least 88% sequence identity, at least 89% sequence identity, at least 90% sequence identity, at least 91% sequence identity, at least 92% sequence identity, at least 93% sequence identity, at least 94% sequence identity, at least 95% sequence identity, at least 96% sequence identity, at least 97% sequence identity, at least 98% sequence identity, or at least 99% sequence identity to SEQ ID NO: 9 [Theobroma (XP_007036352.1)], a tenth polypeptide with at least 70% sequence identity, at least 71% sequence identity, at least 72% sequence identity, at least 73% sequence identity, at least 74% sequence identity, at least 75% sequence identity, at least 76% sequence identity, at least 77% sequence identity, at least 78% sequence identity, at least 79% sequence identity, at least 80% sequence identity, at least 81% sequence identity, at least 82% sequence identity, at least 83% sequence identity, at least 84% sequence identity, at least 85% sequence identity, at least 86% sequence identity, at least 87% sequence identity, at least 88% sequence identity, at least 89% sequence identity, at least 90% sequence identity, at least 91% sequence identity, at least 92% sequence identity, at least 93% sequence identity, at least 94% sequence identity, at least 95% sequence identity, at least 96% sequence identity, at least 97% sequence identity, at least 98% sequence identity, or at least 99% sequence identity to SEQ ID NO: 10 [Ricinus (XP_002527912.1)], an eleventh polypeptide with at least 70% sequence identity, at least 71% sequence identity, at least 72% sequence identity, at least 73% sequence identity, at least 74% sequence identity, at least 75% sequence identity, at least 76% sequence identity, at least 77% sequence identity, at least 78% sequence identity, at least 79% sequence identity, at least 80% sequence identity, at least 81% sequence identity, at least 82% sequence identity, at least 83% sequence identity, at least 84% sequence identity, at least 85% sequence identity, at least 86% sequence identity, at least 87% sequence identity, at least 88% sequence identity, at least 89% sequence identity, at least 90% sequence identity, at least 91% sequence identity, at least 92% sequence identity, at least 93% sequence identity, at least 94% sequence identity, at least 95% sequence identity, at least 96% sequence identity, at least 97% sequence identity, at least 98% sequence identity, or at least 99% sequence identity to SEQ ID NO: 11 [Fragaria (XP_004300916.1)], a twelfth polypeptide with at least 70% sequence identity, at least 71% sequence identity, at least 72% sequence identity, at least 73% sequence identity, at least 74% sequence identity, at least 75% sequence identity, at least 76% sequence identity, at least 77% sequence identity, at least 78% sequence identity, at least 79% sequence identity, at least 80% sequence identity, at least 81% sequence identity, at least 82% sequence identity, at least 83% sequence identity, at least 84% sequence identity, at least 85% sequence identity, at least 86% sequence identity, at least 87% sequence identity, at least 88% sequence identity, at least 89% sequence identity, at least 90% sequence identity, at least 91% sequence identity, at least 92% sequence identity, at least 93% sequence identity, at least 94% sequence identity, at least 95% sequence identity, at least 96% sequence identity, at least 97% sequence identity, at least 98% sequence identity, or at least 99% sequence identity to SEQ ID NO: 12 [Maize (XP_008657477.1)], a thirteenth polypeptide with at least 70% sequence identity, at least 71% sequence identity, at least 72% sequence identity, at least 73% sequence identity, at least 74% sequence identity, at least 75% sequence identity, at least 76% sequence identity, at least 77% sequence identity, at least 78% sequence identity, at least 79% sequence identity, at least 80% sequence identity, at least 81% sequence identity, at least 82% sequence identity, at least 83% sequence identity, at least 84% sequence identity, at least 85% sequence identity, at least 86% sequence identity, at least 87% sequence identity, at least 88% sequence identity, at least 89% sequence identity, at least 90% sequence identity, at least 91% sequence identity, at least 92% sequence identity, at least 93% sequence identity, at least 94% sequence identity, at least 95% sequence identity, at least 96% sequence identity, at least 97% sequence identity, at least 98% sequence identity, or at least 99% sequence identity to SEQ ID NO: 13 [Rice (XP_015628733.1)], a fourteenth polypeptide with at least 70% sequence identity, at least 71% sequence identity, at least 72% sequence identity, at least 73% sequence identity, at least 74% sequence identity, at least 75% sequence identity, at least 76% sequence identity, at least 77% sequence identity, at least 78% sequence identity, at least 79% sequence identity, at least 80% sequence identity, at least 81% sequence identity, at least 82% sequence identity, at least 83% sequence identity, at least 84% sequence identity, at least 85% sequence identity, at least 86% sequence identity, at least 87% sequence identity, at least 88% sequence identity, at least 89% sequence identity, at least 90% sequence identity, at least 91% sequence identity, at least 92% sequence identity, at least 93% sequence identity, at least 94% sequence identity, at least 95% sequence identity, at least 96% sequence identity, at least 97% sequence identity, at least 98% sequence identity, or at least 99% sequence identity to SEQ ID NO: 14 [Wheat (CDM80098.1)], or a fifteenth polypeptide with at least 70% sequence identity, at least 71% sequence identity, at least 72% sequence identity, at least 73% sequence identity, at least 74% sequence identity, at least 75% sequence identity, at least 76% sequence identity, at least 77% sequence identity, at least 78% sequence identity, at least 79% sequence identity, at least 80% sequence identity, at least 81% sequence identity, at least 82% sequence identity, at least 83% sequence identity, at least 84% sequence identity, at least 85% sequence identity, at least 86% sequence identity, at least 87% sequence identity, at least 88% sequence identity, at least 89% sequence identity, at least 90% sequence identity, at least 91% sequence identity, at least 92% sequence identity, at least 93% sequence identity, at least 94% sequence identity, at least 95% sequence identity, at least 96% sequence identity, at least 97% sequence identity, at least 98% sequence identity, or at least 99% sequence identity to SEQ ID NO: 15 [Barley (MLOC_5489.2)]. A further embodiment of this aspect includes the heterologous EPR3 or EPR3-like polypeptide being selected from the group of SEQ ID NO: 1 [L. japonicus (EPR3)], SEQ ID NO: 2 [Chickpea (XP_004489790.1)], SEQ ID NO: 3 [Medicago (XP_003613165.1)], SEQ ID NO: 4 [Soybean (XP_003517716.1)], SEQ ID NO: 5 [Phaseolus (XP_007157313.1)], SEQ ID NO: 6 [Populus (XP_002322185.1)], SEQ ID NO: 7 [Malus (XP_008340354.1)], SEQ ID NO: 8 [Vitis (XP_002272814.2)], SEQ ID NO: 9 [Theobroma (XP_007036352.1)], SEQ ID NO: 10 [Ricinus (XP_002527912.1)], SEQ ID NO: 11 [Fragaria (XP_004300916.1)], SEQ ID NO: 12 [Maize (XP_008657477.1)], SEQ ID NO: 13 [Rice (XP_015628733.1)], SEQ ID NO: 14 [Wheat (CDM80098.1)], or SEQ ID NO: 15 [Barley (MLOC_5489.2)]. An additional embodiment of this aspect includes the heterologous EPR3 or EPR3-like polypeptide having at least 70% sequence identity, at least 71% sequence identity, at least 72% sequence identity, at least 73% sequence identity, at least 74% sequence identity, at least 75% sequence identity, at least 76% sequence identity, at least 77% sequence identity, at least 78% sequence identity, at least 79% sequence identity, at least 80% sequence identity, at least 81% sequence identity, at least 82% sequence identity, at least 83% sequence identity, at least 84% sequence identity, at least 85% sequence identity, at least 86% sequence identity, at least 87% sequence identity, at least 88% sequence identity, at least 89% sequence identity, at least 90% sequence identity, at least 91% sequence identity, at least 92% sequence identity, at least 93% sequence identity, at least 94% sequence identity, at least 95% sequence identity, at least 96% sequence identity, at least 97% sequence identity, at least 98% sequence identity, or at least 99% sequence identity to SEQ ID NO: 93, SEQ ID NO: 94, SEQ ID NO: 95, SEQ ID NO: 96, SEQ ID NO: 97, SEQ ID NO: 98, SEQ ID NO: 99, SEQ ID NO: 100, SEQ ID NO: 101, SEQ ID NO: 102, SEQ ID NO: 103, SEQ ID NO: 104, SEQ ID NO: 105, SEQ ID NO: 106, SEQ ID NO: 107, SEQ ID NO: 108, SEQ ID NO: 109, SEQ ID NO: 110, SEQ ID NO: 111, SEQ ID NO: 112, SEQ ID NO: 113, SEQ ID NO: 114, SEQ ID NO: 115, SEQ ID NO: 116, SEQ ID NO: 117, SEQ ID NO: 118, SEQ ID NO: 119, SEQ ID NO: 120, SEQ ID NO: 121, SEQ ID NO: 122, SEQ ID NO: 123, SEQ ID NO: 124, SEQ ID NO: 125, SEQ ID NO: 126, SEQ ID NO: 127, SEQ ID NO: 128, SEQ ID NO: 129, SEQ ID NO: 130, SEQ ID NO: 131, SEQ ID NO: 132, SEQ ID NO: 133, SEQ ID NO: 134, SEQ ID NO: 135, SEQ ID NO: 136, SEQ ID NO: 137, SEQ ID NO: 138, SEQ ID NO: 139, SEQ ID NO: 140, SEQ ID NO: 141, SEQ ID NO: 142, SEQ ID NO: 143, SEQ ID NO: 144, SEQ ID NO: 145, SEQ ID NO: 146, SEQ ID NO: 147, SEQ ID NO: 148, SEQ ID NO: 149, SEQ ID NO: 150, SEQ ID NO: 151, SEQ ID NO: 152, SEQ ID NO: 153, SEQ ID NO: 154, SEQ ID NO: 155, SEQ ID NO: 156, SEQ ID NO: 157, SEQ ID NO: 158, SEQ ID NO: 159, SEQ ID NO: 160, SEQ ID NO: 161, SEQ ID NO: 162, SEQ ID NO: 163, SEQ ID NO: 164, SEQ ID NO: 165, SEQ ID NO: 166, SEQ ID NO: 167, SEQ ID NO: 168, SEQ ID NO: 169, SEQ ID NO: 170, SEQ ID NO: 171, SEQ ID NO: 172, SEQ ID NO: 173, SEQ ID NO: 174, SEQ ID NO: 175, SEQ ID NO: 176, SEQ ID NO: 177, SEQ ID NO: 178, SEQ ID NO: 179, SEQ ID NO: 180, SEQ ID NO: 181, SEQ ID NO: 182, SEQ ID NO: 183, SEQ ID NO: 184, SEQ ID NO: 185, SEQ ID NO: 186, or SEQ ID NO: 187. A further embodiment of this aspect includes the heterologous EPR3 or EPR3-like polypeptide being SEQ ID NO: 93, SEQ ID NO: 94, SEQ ID NO: 95, SEQ ID NO: 96, SEQ ID NO: 97, SEQ ID NO: 98, SEQ ID NO: 99, SEQ ID NO: 100, SEQ ID NO: 101, SEQ ID NO: 102, SEQ ID NO: 103, SEQ ID NO: 104, SEQ ID NO: 105, SEQ ID NO: 106, SEQ ID NO: 107, SEQ ID NO: 108, SEQ ID NO: 109, SEQ ID NO: 110, SEQ ID NO: 111, SEQ ID NO: 112, SEQ ID NO: 113, SEQ ID NO: 114, SEQ ID NO: 115, SEQ ID NO: 116, SEQ ID NO: 117, SEQ ID NO: 118, SEQ ID NO: 119, SEQ ID NO: 120, SEQ ID NO: 121, SEQ ID NO: 122, SEQ ID NO: 123, SEQ ID NO: 124, SEQ ID NO: 125, SEQ ID NO: 126, SEQ ID NO: 127, SEQ ID NO: 128, SEQ ID NO: 129, SEQ ID NO: 130, SEQ ID NO: 131, SEQ ID NO: 132, SEQ ID NO: 133, SEQ ID NO: 134, SEQ ID NO: 135, SEQ ID NO: 136, SEQ ID NO: 137, SEQ ID NO: 138, SEQ ID NO: 139, SEQ ID NO: 140, SEQ ID NO: 141, SEQ ID NO: 142, SEQ ID NO: 143, SEQ ID NO: 144, SEQ ID NO: 145, SEQ ID NO: 146, SEQ ID NO: 147, SEQ ID NO: 148, SEQ ID NO: 149, SEQ ID NO: 150, SEQ ID NO: 151, SEQ ID NO: 152, SEQ ID NO: 153, SEQ ID NO: 154, SEQ ID NO: 155, SEQ ID NO: 156, SEQ ID NO: 157, SEQ ID NO: 158, SEQ ID NO: 159, SEQ ID NO: 160, SEQ ID NO: 161, SEQ ID NO: 162, SEQ ID NO: 163, SEQ ID NO: 164, SEQ ID NO: 165, SEQ ID NO: 166, SEQ ID NO: 167, SEQ ID NO: 168, SEQ ID NO: 169, SEQ ID NO: 170, SEQ ID NO: 171, SEQ ID NO: 172, SEQ ID NO: 173, SEQ ID NO: 174, SEQ ID NO: 175, SEQ ID NO: 176, SEQ ID NO: 177, SEQ ID NO: 178, SEQ ID NO: 179, SEQ ID NO: 180, SEQ ID NO: 181, SEQ ID NO: 182, SEQ ID NO: 183, SEQ ID NO: 184, SEQ ID NO: 185, SEQ ID NO: 186, or SEQ ID NO: 187.

[0132] A modified EPR3 or EPR3-like polypeptide of the present disclosure includes an EPR3 or EPR3-like polypeptide including a modified ectodomain that has been replaced with all or a portion of an ectodomain of the heterologous EPR3 or EPR3-like polypeptide, optionally all or a part of the M1 domain, the M2 domain, the LysM3 domain, or all three. In an additional embodiment of this aspect, the portion replaced is at least 10%, at least 11%, at least 12%, at least 13%, at least 14%, at least 15%, at least 16%, at least 17%, at least 18%, at least 19%, at least 20%, at least 21%, at least 22%, at least 23%, at least 24%, at least 25%, at least 26%, at least 27%, at least 28%, at least 29%, at least 30%, at least 31%, at least 32%, at least 33%, at least 34%, at least 35%, at least 36%, at least 37%, at least 38%, at least 39%, at least 40%, at least 41%, at least 42%, at least 43%, at least 44%, at least 45%, at least 46%, at least 47%, at least 48%, at least 49%, at least 50%, at least 51%, at least 52%, at least 53%, at least 54%, at least 55%, at least 56%, at least 57%, at least 58%, at least 59%, at least 60%, at least 61%, at least 62%, at least 63%, at least 64%, at least 65%, at least 66%, at least 67%, at least 68%, at least 69%, at least 70%, at least 71%, at least 72%, at least 73%, at least 74%, at least 75%, at least 76%, at least 77%, at least 78%, at least 79%, at least 80%, at least 81%, at least 82%, at least 83%, at least 84%, at least 85%, at least 86%, at least 87%, at least 88%, at least 89%, at least 90%, less than 10%, less than 11%, less than 12%, less than 13%, less than 14%, less than 15%, less than 16%, less than 17%, less than 18%, less than 19%, less than 20%, less than 21%, less than 22%, less than 23%, less than 24%, less than 25%, less than 26%, less than 27%, less than 28%, less than 29%, less than 30%, less than 31%, less than 32%, less than 33%, less than 34%, less than 35%, less than 36%, less than 37%, less than 38%, less than 39%, less than 40%, less than 41%, less than 42%, less than 43%, less than 44%, less than 45%, less than 46%, less than 47%, less than 48%, less than 49%, less than 50%, less than 51%, less than 52%, less than 53%, less than 54%, less than 55%, less than 56%, less than 57%, less than 58%, less than 59%, less than 60%, less than 61%, less than 62%, less than 63%, less than 64%, less than 65%, less than 66%, less than 67%, less than 68%, less than 69%, less than 70%, less than 71%, less than 72%, less than 73%, less than 74%, less than 75%, less than 76%, less than 77%, less than 78%, less than 79%, less than 80%, less than 81%, less than 82%, less than 83%, less than 84%, less than 85%, less than 86%, less than 87%, less than 88%, less than 89%, or less than 90%, of the ectodomain or, optionally all or a part of the M1 domain, the M2 domain, the LysM3 domain, or all three. A further embodiment of this aspect includes the EPR3 or EPR3-like polypeptide being an endogenous EPR3 or EPR3-like polypeptide.

[0133] Certain aspects of the present invention relate to the L. japonicus protein EPR3a (SEQ ID NO: 62). EPR3a has 65% amino acid identity to EPR3 (FIG. 11B), and, based upon homology with EPR3, is a single-pass transmembrane receptor kinase that has an ectodomain with a globular portion and a stalk portion, a transmembrane domain, and a kinase domain (FIGS. 19A-19B). Further aspects of the present disclosure relate to homologs or orthologs of EPR3a (e.g., EPR3a-like proteins). In some embodiments, a homolog or ortholog is structurally similar to L. japonicus EPR3a. FIGS. 25A-25W show an alignment of L. japonicus EPR3a with EPR3a-like proteins from other plant species.

[0134] A heterologous EPR3a or EPR3a-like polypeptide of the present disclosure includes an EPR3a or EPR3a-like polypeptide from a dicot (legume or non-legume) plant species or a monocot plant species. An additional embodiment of this aspect includes the heterologous EPR3a or EPR3a-like polypeptide being selected from the group of a polypeptide with at least 70% sequence identity, at least 71% sequence identity, at least 72% sequence identity, at least 73% sequence identity, at least 74% sequence identity, at least 75% sequence identity, at least 76% sequence identity, at least 77% sequence identity, at least 78% sequence identity, at least 79% sequence identity, at least 80% sequence identity, at least 81% sequence identity, at least 82% sequence identity, at least 83% sequence identity, at least 84% sequence identity, at least 85% sequence identity, at least 86% sequence identity, at least 87% sequence identity, at least 88% sequence identity, at least 89% sequence identity, at least 90% sequence identity, at least 91% sequence identity, at least 92% sequence identity, at least 93% sequence identity, at least 94% sequence identity, at least 95% sequence identity, at least 96% sequence identity, at least 97% sequence identity, at least 98% sequence identity, or at least 99% sequence identity to SEQ ID NO: 62, SEQ ID NO: 63, SEQ ID NO: 64, SEQ ID NO: 65, SEQ ID NO: 66, SEQ ID NO: 67, SEQ ID NO: 68, SEQ ID NO: 69, SEQ ID NO: 70, SEQ ID NO: 71, SEQ ID NO: 72, SEQ ID NO: 73, SEQ ID NO: 74, SEQ ID NO: 75, SEQ ID NO: 76, SEQ ID NO: 77, SEQ ID NO: 78, SEQ ID NO: 79, SEQ ID NO: 80, SEQ ID NO: 81, SEQ ID NO: 82, SEQ ID NO: 83, SEQ ID NO: 84, SEQ ID NO: 85, SEQ ID NO: 86, SEQ ID NO: 87, SEQ ID NO: 88, SEQ ID NO: 89, SEQ ID NO: 90, SEQ ID NO: 91, or SEQ ID NO: 92. A further embodiment of this aspect includes the heterologous EPR3a or EPR3a-like polypeptide being selected from the group of SEQ ID NO: 62, SEQ ID NO: 63, SEQ ID NO: 64, SEQ ID NO: 65, SEQ ID NO: 66, SEQ ID NO: 67, SEQ ID NO: 68, SEQ ID NO: 69, SEQ ID NO: 70, SEQ ID NO: 71, SEQ ID NO: 72, SEQ ID NO: 73, SEQ ID NO: 74, SEQ ID NO: 75, SEQ ID NO: 76, SEQ ID NO: 77, SEQ ID NO: 78, SEQ ID NO: 79, SEQ ID NO: 80, SEQ ID NO: 81, SEQ ID NO: 82, SEQ ID NO: 83, SEQ ID NO: 84, SEQ ID NO: 85, SEQ ID NO: 86, SEQ ID NO: 87, SEQ ID NO: 88, SEQ ID NO: 89, SEQ ID NO: 90, SEQ ID NO: 91, or SEQ ID NO: 92.

[0135] A modified EPR3a or EPR3a-like polypeptide of the present disclosure includes an EPR3a or EPR3a-like polypeptide including a modified ectodomain that has been replaced with all or a portion of an ectodomain of the heterologous EPR3a or EPR3a-like polypeptide, optionally all or a part of the M1 domain, the M2 domain, the LysM3 domain, or all three. In an additional embodiment of this aspect, the portion replaced is at least 10%, at least 11%, at least 12%, at least 13%, at least 14%, at least 15%, at least 16%, at least 17%, at least 18%, at least 19%, at least 20%, at least 21%, at least 22%, at least 23%, at least 24%, at least 25%, at least 26%, at least 27%, at least 28%, at least 29%, at least 30%, at least 31%, at least 32%, at least 33%, at least 34%, at least 35%, at least 36%, at least 37%, at least 38%, at least 39%, at least 40%, at least 41%, at least 42%, at least 43%, at least 44%, at least 45%, at least 46%, at least 47%, at least 48%, at least 49%, at least 50%, at least 51%, at least 52%, at least 53%, at least 54%, at least 55%, at least 56%, at least 57%, at least 58%, at least 59%, at least 60%, at least 61%, at least 62%, at least 63%, at least 64%, at least 65%, at least 66%, at least 67%, at least 68%, at least 69%, at least 70%, at least 71%, at least 72%, at least 73%, at least 74%, at least 75%, at least 76%, at least 77%, at least 78%, at least 79%, at least 80%, at least 81%, at least 82%, at least 83%, at least 84%, at least 85%, at least 86%, at least 87%, at least 88%, at least 89%, at least 90%, less than 10%, less than 11%, less than 12%, less than 13%, less than 14%, less than 15%, less than 16%, less than 17%, less than 18%, less than 19%, less than 20%, less than 21%, less than 22%, less than 23%, less than 24%, less than 25%, less than 26%, less than 27%, less than 28%, less than 29%, less than 30%, less than 31%, less than 32%, less than 33%, less than 34%, less than 35%, less than 36%, less than 37%, less than 38%, less than 39%, less than 40%, less than 41%, less than 42%, less than 43%, less than 44%, less than 45%, less than 46%, less than 47%, less than 48%, less than 49%, less than 50%, less than 51%, less than 52%, less than 53%, less than 54%, less than 55%, less than 56%, less than 57%, less than 58%, less than 59%, less than 60%, less than 61%, less than 62%, less than 63%, less than 64%, less than 65%, less than 66%, less than 67%, less than 68%, less than 69%, less than 70%, less than 71%, less than 72%, less than 73%, less than 74%, less than 75%, less than 76%, less than 77%, less than 78%, less than 79%, less than 80%, less than 81%, less than 82%, less than 83%, less than 84%, less than 85%, less than 86%, less than 87%, less than 88%, less than 89%, or less than 90%, of the ectodomain or, optionally all or a part of the M1 domain, the M2 domain, the LysM3 domain, or all three. A further embodiment of this aspect includes the EPR3a or EPR3a-like polypeptide being an endogenous EPR3a or EPR3a-like polypeptide.

[0136] FIGS. 26A-26L, 27A-27L, and 28A-28M show alignments of the L. japonicus EPR3 polypeptide (EPR3_Lj, SEQ ID NO: 61), the L. japonicus EPR3a polypeptide (EPR3A_Lj, SEQ ID NO: 62) and EPR3-like and EPR3a-like polypeptides from a wide variety of other plant species.

[0137] In order to identify EPR3 or EPR3-like polypeptides of the present disclosure, one of skill in the art would apply the teachings of this disclosure. For example, a first step would be to align the amino acid sequence of the potential EPR3 or EPR3-like receptor with one or more known EPR3 or EPR3-like receptor sequences. An exemplary known EPR3 receptor would be L. japonicus EPR3. The alignment would be used to determine the position of the M1 domain, which is at the N-terminal end of the ectodomain, and corresponds to the position of the LysM1 domain in canonical LysM receptors (FIG. 6). A second step would be to use an ab-initio protein structure prediction program such as Quark (Xu and Zhang Proteins 2012 80: 1715-1735) to predict the structure and fold of the new candidate M1 domain. Then, if the modeled M1 domain of the potential EPR3 or EPR3-like receptor shares the same topology, βαββ fold, and superimposes well with the L. japonicus EPR3 M1 domain, it is an EPR3 or EPR3-like polypeptide.

[0138] The L. japonicus EPR3 kinase domain has kinase activity (FIG. 11K), as does the L. japonicus EPR3s kinase domain (FIGS. 11L-11M). Without wishing to be bound by theory, EPR3 receptors, EPR3-like receptors, EPR3a receptors, and EPR3a-like receptors therefore may be capable of acting as independent receptors or may act as co-receptors with another protein (see, e.g., FIGS. 19A-19B and 34A-34B). For an EPR3 or EPR3-like receptor, the co-receptor may be the corresponding EPR3a or EPR3a-like receptor. Similarly, for an EPR3a or EPR3a-like receptor, the co-receptor may be the corresponding EPR3 or EPR3-like receptor. The presence or absence of a co-receptor may depend on the type of signal being perceived, and some microbial signals may be transmitted by only an EPR3, EPR3-like, EPR3a, or EPR3a-like receptor.

[0139] Transformation and generation of genetically altered monocotyledonous and dicotyledonous plant cells is well known in the art. See, e.g., Weising, et al., Ann. Rev. Genet. 22:421-477 (1988); U.S. Pat. No. 5,679,558; Agrobacterium Protocols, ed: Gartland, Humana Press Inc. (1995); and Wang, et al. Acta Hort. 461:401-408 (1998). The choice of method varies with the type of plant to be transformed, the particular application and/or the desired result. The appropriate transformation technique is readily chosen by the skilled practitioner.

[0140] Any methodology known in the art to delete, insert or otherwise modify the cellular DNA (e.g., genomic DNA and organelle DNA) can be used in practicing the inventions disclosed herein. For example, a disarmed Ti plasmid, containing a genetic construct for deletion or insertion of a target gene, in Agrobacterium tumefaciens can be used to transform a plant cell, and thereafter, a transformed plant can be regenerated from the transformed plant cell using procedures described in the art, for example, in EP 0116718, EP 0270822, PCT publication WO 84/02913 and published European Patent application (“EP”) 0242246. Ti-plasmid vectors each contain the gene between the border sequences, or at least located to the left of the right border sequence, of the T-DNA of the Ti-plasmid. Of course, other types of vectors can be used to transform the plant cell, using procedures such as direct gene transfer (as described, for example in EP 0233247), pollen mediated transformation (as described, for example in EP 0270356, PCT publication WO 85/01856, and U.S. Pat. No. 4,684,611), plant RNA virus-mediated transformation (as described, for example in EP 0 067 553 and U.S. Pat. No. 4,407,956), liposome-mediated transformation (as described, for example in U.S. Pat. No. 4,536,475), and other methods such as the methods for transforming certain lines of corn (e.g., U.S. Pat. No. 6,140,553; Fromm et al., Bio/Technology (1990) 8, 833-839); Gordon-Kamm et al., The Plant Cell, (1990) 2, 603-618) and rice (Shimamoto et al., Nature, (1989) 338, 274-276; Datta et al., Bio/Technology, (1990) 8, 736-740) and the method for transforming monocots generally (PCT publication WO 92/09696). For cotton transformation, the method described in PCT patent publication WO 00/71733 can be used. For soybean transformation, reference is made to methods known in the art, e.g., Hinchee et al. (Bio/Technology, (1988) 6, 915) and Christou et al. (Trends Biotech, (1990) 8, 145) or the method of WO 00/42207.

[0141] Genetically altered plants of the present invention can be used in a conventional plant breeding scheme to produce more genetically altered plants with the same characteristics, or to introduce the genetic alteration(s) in other varieties of the same or related plant species. Seeds, which are obtained from the altered plants, preferably contain the genetic alteration(s) as a stable insert in nuclear DNA or as modifications to an endogenous gene or promoter. Plants comprising the genetic alteration(s) in accordance with the invention include plants comprising, or derived from, root stocks of plants comprising the genetic alteration(s) of the invention, e.g., fruit trees or ornamental plants. Hence, any non-transgenic grafted plant parts inserted on a transformed plant or plant part are included in the invention.

[0142] Introduced genetic elements, whether in an expression vector or expression cassette, which result in the expression of an introduced gene, will typically utilize a plant-expressible promoter. A ‘plant-expressible promoter’ as used herein refers to a promoter that ensures expression of the genetic alteration(s) of the invention in a plant cell. Examples of promoters directing constitutive expression in plants are known in the art and include: the strong constitutive 35S promoters (the “35S promoters”) of the cauliflower mosaic virus (CaMV), e.g., of isolates CM 1841 (Gardner et al., Nucleic Acids Res, (1981) 9, 2871-2887), CabbB S (Franck et al., Cell (1980) 21, 285-294; Kay et al., Science, (1987) 236, 4805) and CabbB JI (Hull and Howell, Virology, (1987) 86, 482-493); cassava vein mosaic virus promoter (CsVMV); promoters from the ubiquitin family (e.g., the maize ubiquitin promoter of Christensen et al., Plant Mol Biol, (1992) 18, 675-689, or the A. thaliana UBQ10 promoter of Norris et al. Plant Mol. Biol. (1993) 21, 895-906), the gos2 promoter (de Pater et al., The Plant J (1992) 2, 834-844), the emu promoter (Last et al., Theor Appl Genet, (1990) 81, 581-588), actin promoters such as the promoter described by An et al. (The Plant J, (1996) 10, 107), the rice actin promoter described by Zhang et al. (The Plant Cell, (1991) 3, 1155-1165); promoters of the Cassava vein mosaic virus (WO 97/48819, Verdaguer et al. (Plant Mol Biol, (1998) 37, 1055-1067), the pPLEX series of promoters from Subterranean Clover Stunt Virus (WO 96/06932, particularly the S4 or S7 promoter), an alcohol dehydrogenase promoter, e.g., pAdh1S (GenBank accession numbers X04049, X00581), and the TR1′ promoter and the TR2′ promoter (the “TR1′ promoter” and “TR2′ promoter”, respectively) which drive the expression of the 1′ and 2′ genes, respectively, of the T DNA (Velten et al., EMBO J, (1984) 3, 2723 2730).

[0143] Alternatively, a plant-expressible promoter can be a tissue-specific promoter, i.e., a promoter directing a higher level of expression in some cells or tissues of the plant, e.g., in leaf mesophyll cells. In preferred embodiments, leaf mesophyll specific promoters or leaf guard cell specific promoters will be used. Non-limiting examples include the leaf specific Rbcs1A promoter (A. thaliana RuBisCO small subunit 1A (AT1G67090) promoter), GAPA-1 promoter (A. thaliana Glyceraldehyde 3-phosphate dehydrogenase A subunit 1 (AT3G26650) promoter), and FBA2 promoter (A. thaliana Fructose-bisphosphate aldolase 2 317 (AT4G38970) promoter) (Kromdijk et al., Science, 2016). Further non-limiting examples include the leaf mesophyll specific FBPase promoter (Peleg et al., Plant J, 2007), the maize or rice rbcS promoter (Nomura et al., Plant Mol Biol, 2000), the leaf guard cell specific A. thaliana KATI promoter (Nakamura et al., Plant Phys, 1995), the A. thaliana Myrosinase-Thioglucoside glucohydrolase 1 (TGG1) promoter (Husebye et al., Plant Phys, 2002), the A. thaliana rhal promoter (Terryn et al., Plant Cell, 1993), the A. thaliana AtCHX20 promoter (Padmanaban et al., Plant Phys, 2007), the A. thaliana HIC (High carbon dioxide) promoter (Gray et al., Nature, 2000), the A. thaliana CYTOCHROME P450 86A2 (CYP86A2) mono-oxygenase promoter (pCYP) (Francia et al., Plant Signal & Behav, 2008; Galbiati et al., The Plant Journal, 2008), the potato ADP-glucose pyrophosphorylase (AGPase) promoter (Muller-Rober et al., The Plant Cell 1994), the grape R2R3 MYB60 transcription factor promoter (Galbiati et al., BMC Plant Bio, 2011), the A. thaliana AtMYB60 promoter (Cominelli et al., Current Bio, 2005; Cominelli et al., BMC Plant Bio, 2011), the A. thaliana At1g22690-promoter (pGC1) (Yang et al., Plant Methods, 2008), and the A. thaliana AtMYB 61 promoter (Liang et al., Curr Biol, 2005). These plant promoters can be combined with enhancer elements, they can be combined with minimal promoter elements, or can comprise repeated elements to ensure the expression profile desired.

[0144] In some embodiments, genetic elements to increase expression in plant cells can be utilized. For example, an intron at the 5′ end or 3′ end of an introduced gene, or in the coding sequence of the introduced gene, e.g., the hsp70 intron. Other such genetic elements can include, but are not limited to, promoter enhancer elements, duplicated or triplicated promoter regions, 5′ leader sequences different from another transgene or different from an endogenous (plant host) gene leader sequence, 3′ trailer sequences different from another transgene used in the same plant or different from an endogenous (plant host) trailer sequence.

[0145] An introduced gene of the present invention can be inserted in host cell DNA so that the inserted gene part is upstream (i.e., 5′) of suitable 3′ end transcription regulation signals (e.g., transcript formation and polyadenylation signals). This is preferably accomplished by inserting the gene in the plant cell genome (nuclear or chloroplast). Preferred polyadenylation and transcript formation signals include those of the A. tumefaciens nopaline synthase gene (Nos terminator; Depicker et al., J. Molec Appl Gen, (1982) 1, 561-573), the octopine synthase gene (OCS terminator; Gielen et al., EMBO J, (1984) 3:835 845), the A. thaliana heat shock protein terminator (HSP terminator); the SCSV or the Malic enzyme terminators (Schunmann et al., Plant Funct Biol, (2003) 30:453-460), and the T DNA gene 7 (Velten and Schell, Nucleic Acids Res, (1985) 13, 6981 6998), which act as 3′ untranslated DNA sequences in transformed plant cells. In some embodiments, one or more of the introduced genes are stably integrated into the nuclear genome. Stable integration is present when the nucleic acid sequence remains integrated into the nuclear genome and continues to be expressed (e.g., detectable mRNA transcript or protein is produced) throughout subsequent plant generations. Stable integration into and/or editing of the nuclear genome can be accomplished by any known method in the art (e.g., microparticle bombardment, Agrobacterium-mediated transformation, CRISPR/Cas9, electroporation of protoplasts, microinjection, etc.).

[0146] The term recombinant or modified nucleic acids refers to polynucleotides which are made by the combination of two otherwise separated segments of sequence accomplished by the artificial manipulation of isolated segments of polynucleotides by genetic engineering techniques or by chemical synthesis. In so doing one may join together polynucleotide segments of desired functions to generate a desired combination of functions.

[0147] As used herein, the terms “overexpression” and “upregulation” refer to increased expression (e.g., of mRNA, polypeptides, etc.) relative to expression in a wild type organism (e.g., plant) as a result of genetic modification. In some embodiments, the increase in expression is a slight increase of about 10% more than expression in wild type. In some embodiments, the increase in expression is an increase of 50% or more (e.g., 60%, 70%, 80%, 100%, etc.) relative to expression in wild type. In some embodiments, an endogenous gene is overexpressed. In some embodiments, an exogenous gene is overexpressed by virtue of being expressed. Overexpression of a gene in plants can be achieved through any known method in the art, including but not limited to, the use of constitutive promoters, inducible promoters, high expression promoters, enhancers, transcriptional and/or translational regulatory sequences, codon optimization, modified transcription factors, and/or mutant or modified genes that control expression of the gene to be overexpressed.

[0148] Where a recombinant nucleic acid is intended for expression, cloning, or replication of a particular sequence, DNA constructs prepared for introduction into a host cell will typically comprise a replication system (e.g. vector) recognized by the host, including the intended DNA fragment encoding a desired polypeptide, and can also include transcription and translational initiation regulatory sequences operably linked to the polypeptide-encoding segment. Additionally, such constructs can include cellular localization signals (e.g., plasma membrane localization signals). In preferred embodiments, such DNA constructs are introduced into a host cell's genomic DNA, chloroplast DNA or mitochondrial DNA.

[0149] In some embodiments, a non-integrated expression system can be used to induce expression of one or more introduced genes. Expression systems (expression vectors) can include, for example, an origin of replication or autonomously replicating sequence (ARS) and expression control sequences, a promoter, an enhancer and necessary processing information sites, such as ribosome-binding sites, RNA splice sites, polyadenylation sites, transcriptional terminator sequences, and mRNA stabilizing sequences. Signal peptides can also be included where appropriate from secreted polypeptides of the same or related species, which allow the protein to cross and/or lodge in cell membranes, cell wall, or be secreted from the cell.

[0150] Selectable markers useful in practicing the methodologies of the invention disclosed herein can be positive selectable markers. Typically, positive selection refers to the case in which a genetically altered cell can survive in the presence of a toxic substance only if the recombinant polynucleotide of interest is present within the cell. Negative selectable markers and screenable markers are also well known in the art and are contemplated by the present invention. One of skill in the art will recognize that any relevant markers available can be utilized in practicing the inventions disclosed herein.

[0151] Screening and molecular analysis of recombinant strains of the present invention can be performed utilizing nucleic acid hybridization techniques. Hybridization procedures are useful for identifying polynucleotides, such as those modified using the techniques described herein, with sufficient homology to the subject regulatory sequences to be useful as taught herein. The particular hybridization techniques are not essential to the subject invention. As improvements are made in hybridization techniques, they can be readily applied by one of skill in the art. Hybridization probes can be labeled with any appropriate label known to those of skill in the art. Hybridization conditions and washing conditions, for example temperature and salt concentration, can be altered to change the stringency of the detection threshold. See, e.g., Sambrook et al. (1989) vide infra or Ausubel et al. (1995) Current Protocols in Molecular Biology, John Wiley & Sons, NY, N.Y., for further guidance on hybridization conditions.

[0152] Additionally, screening and molecular analysis of genetically altered strains, as well as creation of desired isolated nucleic acids can be performed using Polymerase Chain Reaction (PCR). PCR is a repetitive, enzymatic, primed synthesis of a nucleic acid sequence. This procedure is well known and commonly used by those skilled in this art (see Mullis, U.S. Pat. Nos. 4,683,195, 4,683,202, and 4,800,159; Saiki et al. (1985) Science 230:1350-1354). PCR is based on the enzymatic amplification of a DNA fragment of interest that is flanked by two oligonucleotide primers that hybridize to opposite strands of the target sequence. The primers are oriented with the 3′ ends pointing towards each other. Repeated cycles of heat denaturation of the template, annealing of the primers to their complementary sequences, and extension of the annealed primers with a DNA polymerase result in the amplification of the segment defined by the 5′ ends of the PCR primers. Because the extension product of each primer can serve as a template for the other primer, each cycle essentially doubles the amount of DNA template produced in the previous cycle. This results in the exponential accumulation of the specific target fragment, up to several million-fold in a few hours. By using a thermostable DNA polymerase such as the Taq polymerase, which is isolated from the thermophilic bacterium Thermus aquaticus, the amplification process can be completely automated. Other enzymes which can be used are known to those skilled in the art.

[0153] Nucleic acids and proteins of the present invention can also encompass homologues of the specifically disclosed sequences. Homology (e.g., sequence identity) can be 50%-100%. In some instances, such homology is greater than 80%, greater than 85%, greater than 90%, or greater than 95%. The degree of homology or identity needed for any intended use of the sequence(s) is readily identified by one of skill in the art. As used herein percent sequence identity of two nucleic acids is determined using an algorithm known in the art, such as that disclosed by Karlin and Altschul (1990) Proc. Natl. Acad. Sci. USA 87:2264-2268, modified as in Karlin and Altschul (1993) Proc. Natl. Acad. Sci. USA 90:5873-5877. Such an algorithm is incorporated into the BLASTN, BLASTP, and BLASTX, programs of Altschul et al. (1990) J. Mol. Biol. 215:402-410. BLAST nucleotide searches are performed with the BLASTN program, score=100, wordlength=12, to obtain nucleotide sequences with the desired percent sequence identity. To obtain gapped alignments for comparison purposes, Gapped BLAST is used as described in Altschul et al. (1997) Nucl. Acids. Res. 25:3389-3402. When utilizing BLAST and Gapped BLAST programs, the default parameters of the respective programs (BLASTN and BLASTX) are used. See www.ncbi.nih.gov. One of skill in the art can readily determine in a sequence of interest where a position corresponding to amino acid or nucleic acid in a reference sequence occurs by aligning the sequence of interest with the reference sequence using the suitable BLAST program with the default settings (e.g., for BLASTP: Gap opening penalty: 11, Gap extension penalty: 1, Expectation value: 10, Word size: 3, Max scores: 25, Max alignments: 15, and Matrix: blosum62; and for BLASTN: Gap opening penalty: 5, Gap extension penalty:2, Nucleic match: 1, Nucleic mismatch—3, Expectation value: 10, Word size: 11, Max scores: 25, and Max alignments: 15).

[0154] Preferred host cells are plant cells. Recombinant host cells, in the present context, are those which have been genetically modified to contain an isolated nucleic molecule, contain one or more deleted or otherwise non-functional genes normally present and functional in the host cell, or contain one or more genes to produce at least one recombinant protein. The nucleic acid(s) encoding the protein(s) of the present invention can be introduced by any means known to the art which is appropriate for the particular type of cell, including without limitation, transformation, lipofection, electroporation or any other methodology known by those skilled in the art.

### Plant Breeding Methods

[0155] Plant breeding begins with the analysis of the current germplasm, the definition of problems and weaknesses of the current germplasm, the establishment of program goals, and the definition of specific breeding objectives. The next step is the selection of germplasm that possess the traits to meet the program goals. The selected germplasm is crossed in order to recombine the desired traits and through selection, varieties or parent lines are developed. The goal is to combine in a single variety or hybrid an improved combination of desirable traits from the parental germplasm. These important traits may include higher yield, field performance, improved fruit and agronomic quality, resistance to biological stresses, such as diseases and pests, and tolerance to environmental stresses, such as drought and heat.

[0156] Each breeding program should include a periodic, objective evaluation of the efficiency of the breeding procedure. Evaluation criteria vary depending on the goal and objectives, but should include gain from selection per year based on comparisons to an appropriate standard, overall value of the advanced breeding lines, and number of successful cultivars produced per unit of input (e.g., per year, per dollar expended, etc.). Promising advanced breeding lines are thoroughly tested and compared to appropriate standards in environments representative of the commercial target area(s) for three years at least. The best lines are candidates for new commercial cultivars; those still deficient in a few traits are used as parents to produce new populations for further selection. These processes, which lead to the final step of marketing and distribution, usually take five to ten years from the time the first cross or selection is made.

[0157] The choice of breeding or selection methods depends on the mode of plant reproduction, the heritability of the trait(s) being improved, and the type of cultivar used commercially (e.g., F₁ hybrid cultivar, inbred cultivar, etc.). For highly heritable traits, a choice of superior individual plants evaluated at a single location will be effective, whereas for traits with low heritability, selection should be based on mean values obtained from replicated evaluations of families of related plants. The complexity of inheritance also influences the choice of the breeding method. Backcross breeding is used to transfer one or a few genes for a highly heritable trait into a desirable cultivar (e.g., for breeding disease-resistant cultivars), while recurrent selection techniques are used for quantitatively inherited traits controlled by numerous genes, various recurrent selection techniques are used. Commonly used selection methods include pedigree selection, modified pedigree selection, mass selection, and recurrent selection.

[0158] Pedigree selection is generally used for the improvement of self-pollinating crops or inbred lines of cross-pollinating crops. Two parents which possess favorable, complementary traits are crossed to produce an F₁. An F₂ population is produced by selfing one or several F₁s or by intercrossing two F₁s (sib mating). Selection of the best individuals is usually begun in the F₂ population; then, beginning in the F₃, the best individuals in the best families are selected. Replicated testing of families, or hybrid combinations involving individuals of these families, often follows in the F₄ generation to improve the effectiveness of selection for traits with low heritability. At an advanced stage of inbreeding (i.e., F₆ and F₇), the best lines or mixtures of phenotypically similar lines are tested for potential release as new cultivars.

[0159] Mass and recurrent selections can be used to improve populations of either self- or cross-pollinating crops. A genetically variable population of heterozygous individuals is either identified or created by intercrossing several different parents. The best plants are selected based on individual superiority, outstanding progeny, or excellent combining ability. The selected plants are intercrossed to produce a new population in which further cycles of selection are continued.

[0160] Backcross breeding (i.e., recurrent selection) may be used to transfer genes for a simply inherited, highly heritable trait into a desirable homozygous cultivar or line that is the recurrent parent. The source of the trait to be transferred is called the donor parent. The resulting plant is expected to have the attributes of the recurrent parent (e.g., cultivar) and the desirable trait transferred from the donor parent. After the initial cross, individuals possessing the phenotype of the donor parent are selected and repeatedly crossed (backcrossed) to the recurrent parent. The resulting plant is expected to have the attributes of the recurrent parent (e.g., cultivar) and the desirable trait transferred from the donor parent.

[0161] The single-seed descent procedure in the strict sense refers to planting a segregating population, harvesting a sample of one seed per plant, and using the one-seed sample to plant the next generation. When the population has been advanced from the F₂ to the desired level of inbreeding, the plants from which lines are derived will each trace to different F₂ individuals. The number of plants in a population declines each generation due to failure of some seeds to germinate or some plants to produce at least one seed. As a result, not all of the F₂ plants originally sampled in the population will be represented by a progeny when generation advance is completed.

[0162] In addition to phenotypic observations, the genotype of a plant can also be examined. There are many laboratory-based techniques available for the analysis, comparison and characterization of plant genotype; among these are Isozyme Electrophoresis, Restriction Fragment Length Polymorphisms (RFLPs), Randomly Amplified Polymorphic DNAs (RAPDs), Arbitrarily Primed Polymerase Chain Reaction (AP-PCR), DNA Amplification Fingerprinting (DAF), Sequence Characterized Amplified Regions (SCARs), Amplified Fragment Length polymorphisms (AFLPs), Simple Sequence Repeats (SSRs—which are also referred to as Microsatellites), and Single Nucleotide Polymorphisms (SNPs).

[0163] Molecular markers, or “markers”, can also be used during the breeding process for the selection of qualitative traits. For example, markers closely linked to alleles or markers containing sequences within the actual alleles of interest can be used to select plants that contain the alleles of interest. The use of markers in the selection process is often called genetic marker enhanced selection or marker-assisted selection. Methods of performing marker analysis are generally known to those of skill in the art.

[0164] Mutation breeding may also be used to introduce new traits into plant varieties. Mutations that occur spontaneously or are artificially induced can be useful sources of variability for a plant breeder. The goal of artificial mutagenesis is to increase the rate of mutation for a desired characteristic. Mutation rates can be increased by many different means including temperature, long-term seed storage, tissue culture conditions, radiation (such as X-rays, Gamma rays, neutrons, Beta radiation, or ultraviolet radiation), chemical mutagens (such as base analogs like 5-bromo-uracil), antibiotics, alkylating agents (such as sulfur mustards, nitrogen mustards, epoxides, ethyleneamines, sulfates, sulfonates, sulfones, or lactones), azide, hydroxylamine, nitrous acid or acridines. Once a desired trait is observed through mutagenesis the trait may then be incorporated into existing germplasm by traditional breeding techniques. Details of mutation breeding can be found in Principles of Cultivar Development: Theory and Technique, Walter Fehr (1991), Agronomy Books, 1 (https://lib.dr.iastate.edu/agron_books/1).

[0165] The production of double haploids can also be used for the development of homozygous lines in a breeding program. Double haploids are produced by the doubling of a set of chromosomes from a heterozygous plant to produce a completely homozygous individual. For example, see Wan, et al., Theor. Appl. Genet., 77:889-892, 1989.

[0166] Additional non-limiting examples of breeding methods that may be used include, without limitation, those found in Principles of Plant Breeding, John Wiley and Son, pp. 115-161 (1960); Principles of Cultivar Development: Theory and Technique, Walter Fehr (1991), Agronomy Books, 1 (https://lib.dr.iastate.edu/agron_books/1), which are herewith incorporated by reference.

[0167] Having generally described this invention, the same will be better understood by reference to certain specific examples, which are included herein to further illustrate the invention and are not intended to limit the scope of the invention as defined by the claims.

### EXAMPLES

[0168] The present disclosure is described in further detail in the following examples which are not in any way intended to limit the scope of the disclosure as claimed. The attached figures are meant to be considered as integral parts of the specification and description of the disclosure. The following examples are offered to illustrate, but not to limit the claimed disclosure.

### Example 1: Structure of a Plant Receptor Perceiving Bacterial Exopolysaccharides

[0169] The following example describes the determination of the crystal structure of the Lotus japonicus Exopolysaccharide Receptor 3 (EPR3) ectodomain.

### Materials and Methods

[0170] Production of L. japonicus EPR3 Ectodomain Protein

[0171] Expression and purification of L. japonicus ecotype Gifu EPR3 ectodomain (ED) was performed as described previously (Kawaharada, Y et al. Nature 2015 523: 308-312). In brief, DNA encoding residues 33-232 of EPR3 (corresponding to the EPR3 ED) containing an N-terminal gp67 secretion signal and a C-terminal 6×His-tag was codon-optimized for insect cell expression (GenScript) and inserted into the pOET2 vector (Oxford Expression Technologies). Baculoviruses, used for infecting Sf9 cells cultured in suspension in serum-free HyClone SFX-Insect medium (FisherScientific), were obtained using the flashBAC GOLD system (OET). Five days post inoculation, the media was dialyzed against buffer containing 50 mM Tris-HCl pH 8.0 and 200 mM NaCl before centrifugation and loaded on a HisTrap excel affinity column (GE Healthcare). The eluted protein was dialyzed against buffer containing 50 mM Tris-HCl pH 8.0 and 200 mM NaCl, and further purified on a HisTrap HP affinity column (GE Healthcare). For crystallization, the EPR3 ED was treated with PNGase F (1:15 w/w ratio) for 1 hour at room temperature and overnight at 4° C. to remove N-linked oligosaccharides. EPR3 ED was then purified on a Mono S 5/50 column (GE Healthcare) and eluted with a linear gradient of 50-300 mM NaCl and 50 mM Tris-HCl, pH 7.0. Both glycosylated and de-glycosylated EPR3 ED were finally purified on a Superdex 75 10/300 column (GE Healthcare) in gel filtration buffer containing 50 mM KH2-PO4 pH 7.8 and 200 mM NaCl (for microscale thermophoresis binding experiments) or 50 mM Tris-HCl pH 8.0 and 200 mM NaCl (for crystallization).

### Nanobody Production

[0172] A llama (Lama glama) was immunized four times with 100 μg of purified EPR3 ED. From a blood sample, peripheral blood lymphocytes were isolated and RNA was extracted using RNase Plus Mini Kit (Qiagen). Total cDNA was generated using the Superscript III First-Strand Kit (Invitrogen) with random hexamer primers. The coding regions of the nanobodies (Nbs) were amplified by PCR and inserted into a phagemid vector backbone where the Nbs were C-terminally fused to an E-tag followed by the pIII coat protein. VCSM13 helper phage was used for generating the final M13 phage display Nb library. For selection, EPR3 ED was biotinylated via primary amine coupling using the Chromalink NHS labelling system (Solulink) and 20 μg EPR3 antigen was added to 100 μl MyOne Streptavidin T1 Dynabeads (Thermo Fisher Scientific) in PBS supplemented with 2% BSA. M13 phage particles (2.5×10¹³) were added and incubated with EPR3 coated Dynabeads for 1 hour before 15 wash steps with 1 ml PBS containing 0.1% Tween 20. Phages were eluted by incubating the beads with 0.2 M glycine pH 2.2 for 15 min. The eluted phage particles were amplified and used in a second round of phage display where a reduced amount of EPR3 ED antigen (2 μg) and fewer M13 phage particles (2.5×10¹²) were used. After two rounds of phage display selections, single colonies were picked and grown in LB media in a 96-well plate format for 6 hours before Nb expression was induced with 0.8 mM IPTG overnight at 30° C. The 96-well plate was centrifuged and 50 μl of the supernatant were transferred to an EPR3 ED-coated ELISA plate prepared by coating each well with 0.1 μg EPR3 ED and by blocking with PBS containing 0.1% Tween 20 and 2% BSA. After addition of the supernatant, the EPR3 ED-coated ELISA plate was incubated for 1 hour and then washed six times in PBS with 0.1% Tween 20 before anti-E-tag-HPR antibody (Bethyl) was added at a 1:10,000 dilution. The plate was incubated for 1 hour, washed and developed with 3,3′,5,5′-tetramethylbenzidine. The reaction was quenched with 1 M HCl and the absorbance was measured at 450 nm. Phagemids from positive clones were isolated, sequenced and the encoding DNA were cloned into the pET22b(+)(Novagen) for bacterial expression. Nb186 was expressed in E. coli LOBSTR cells (Andersen, K. R. et al. Proteins 2013 81: 1857-1861) that were grown to an optical density of 0.6 at 600 nm before protein expression was induced with 0.2 mM IPTG at 18° C. overnight. Cells were lysed in buffer containing 50 mM Tris-HCl pH 8.0, 500 mM NaCl, 20 mM imidazole and 1 mM benzamidine, and the cleared supernatant was loaded onto a Ni Sepharose 6 FF affinity column (GE Healthcare) and washed prior to elution in lysis buffer supplemented with 500 mM imidazole. Nb186 was finally purified on a Superdex 75 10/300 gel filtration column (GE Healthcare) in gel filtration buffer containing 50 mM Tris-HCl pH 8.0 and 200 mM NaCl. Complex formation between EPR3 ED and Nb186 was analyzed on an analytic Superdex 75 Increase 3.2/300 column. The high-affinity nanobody Nb186 formed a tight complex with EPR3 ED as demonstrated by a mobility shift in gel filtration (FIG. 1A). FIG. 1B shows the isolation of the co-purified EPR3 ED-Nb186 complex.

### Crystallization and Structure Determination

[0173] Purified de-glycosylated EPR3 ED and Nb186 was mixed in a 1:1.1 molar ratio and incubated on ice for 1 hour before purification on a Superdex 75 10/300 column. The peak fractions containing the EPR3 ED-Nb186 complex were pooled and concentrated on a VivaSpin filter (Sartorius) to 5-8 mg/ml and crystallized using the vapor diffusion method by mixing an equal volume of protein and reservoir solution (18% 2-propanol, 0.1 M Sodium Citrate pH 5.5 and 20% PEG 4000). Crystals were cryo-protected in mother liquor with the addition of 20% ethylene glycol before being flash-frozen in liquid nitrogen.

[0174] Diffraction data was measured at DESY PX14 beamline at a wavelength of 0.9763 Å and data reduction was performed in XDS (Kabsch, W. XDS. Acta Crystallographica Section D Biological Crystallography 2010 66:125-132). A molecular replacement solution was found with phenix.phaser (McCoy, A. J. et al. Journal of Applied Crystallography 2007 40: 658-674) using a homology model of Nb186 generated with Phyre2 (Kelley, L. A. et al. Nat Protoc 2015 10: 845-858) truncated of its complementarity-determining regions (CDRs). In a second molecular replacement search a homology model of EPR3 generated with Phyre2 and truncated of high b-factor region based on CERKI structure (PDB entry 4EBZ) was placed. The structure of the EPR3-Nb186 complex was built in Coot (Emsley, P. et al. Acta Crystallographica Section D Biological Crystallography 2010 66:486-501) and coordinates and temperature factors were refined using phenix.refine (Adams, P. D. et al. Acta Crystallographica Section D Biological Crystallography 2010 66: 213-221). The final model contained residues 1-119 of Nb186 and residues 36-216 of EPR3 with 98% of the protein residues in the favored region and none in the disallowed region of the Ramachandran plot. The figures were prepared with PyMOL and data and refinement statistics are summarized in Table 1. The co-structure of the EPR3 ED-Nb186 complex was determined from a well-diffracting crystal (FIG. 1C) and refined with data extending to 1.9 Å resolution (FIG. 1D and Table 1).

TABLE 1
Data collection and refinement statistics. Data was
collected from one crystal, and values in parentheses
(denoted with *) are for highest-resolution shell.
EPR3 data collection

| Space group | P 1 21 1 | |
|---|---|---|
| Cell dimensions | 59.82, 36.08, 72.66 | |
| a, b, c (Å) | 90.00, 93.92, 90.00 | |
| α, β, γ (°) | | |
| Resolution (Å) | 47.7-1.87 | (1.94-1.87)* |
| R_{merge} (%) | 8.7 | (82.2) |
| I/σI | 15.96 | (1.94) |
| Completeness (%) | 96.9 | (81.1) |
| Redundancy | 6.3 | (4.3) |

EPR3 refinement

| Resolution (Å) | 47.7-1.87 | (1.94-1.87)* |
|---|---|---|
| No. reflections | 25176 | (2151) |
| R_{work}/R_{free} (%) | 17.42/21.72 | |
| No. atoms | | |
| Protein | 2337 | |
| Glycosylation | 14 | |
| Water | 134 | |
| B-factors (Å²) | | |
| Protein | 42.48 | |
| Glycosylation | 135.82 | |
| Water | 41.35 | |
| R.m.s. deviations | | |

| | |
|---|---|
| Bond lengths (Å) | 0.006 |
| Bond angles (°) | 0.83 |

### Modelling

[0175] De novo modelling of the M1 domain of L. japonicus EPR3 and EPR3 homologs (corresponding to residues 56-99 to in L. japonicus EPR3) was performed using atomic-level knowledge-based force field simulations (Xu, D. et al. Proteins 2012 80: 1715-1735).

### Small-Angle X-Ray Scattering (SAXS)

[0176] EPR3 ED was purified by gel filtration in gel filtration buffer and a monodisperse peak fraction was collected and used for SAXS measurements. Scattering from EPR3 ED samples (either with no ligand or with R7A EPS (1 mM) or R7A exoU EPS (1 mM) added) at concentrations ranging from 0.6-22.0 mg/ml (multiple technical replicates at different concentrations) were collected at the EMBL P12 beamline PETRA III in a temperature-controlled cell (20° C.) at a wavelength of 1.24 Å. Normalization, radial averaging and buffer subtractions were done at the beamline using the automated pipeline. Data analysis and ab initio low resolution modelling were performed in DAMMIN (Svergun, D. I. Biophysical Journal 1999 76: 2879-2886). The scattering, Guinier plots and pair distance distribution plots were prepared with the GraphPad Prism 7 software (FIGS. 4A-4C, FIGS. 8A-8G).

### Results

### Crystal Structure of the EPR3 Ectodomain

[0177] To understand the basis for EPS perception, the L. japonicus EPR3 ectodomain (hereafter referred to as EPR3 ED) was expressed in insect cells, purified and crystallized with the help of llama-derived miniature antibodies (nanobodies) targeting EPR3 ED (Bukowska, M. A. & Grater, M. G. Current Opinion in Structural Biology 2013 23: 409-416; Hansen, S. B. et al. Acta Crystallographica D Structural Biology 2017 73: 804-813). The overall structure of EPR3 ED was found to contain three interconnected domains (M1, M2 and LysM3) arranged in a cloverleaf-shape stabilized by three internal disulfide bridges (FIG. 2A). Interestingly, the crystal structure of the EPR3 ED revealed a novel fold of the M1 domain that was structurally unique. M1 is composed of only one α-helix and three elongated β-strands (NM topology). The exterior β2-strand was stabilized by seven backbone hydrogen bonds to the adjacent β3-strand, which gave M1 an overall βαββ arrangement where the three β-strands formed an extended anti-parallel β-sheet (FIG. 2B). The M2 domain of EPR3 ED was also unusual as it contained βαβ fold and lacked the defined second α-helix compared to a classical LysM domain (FIG. 2C). LysM3 had the LysM βααβ fold, with a root-mean-square deviation (RMSD) of 1.2 Å to the LysM3 domain in the L. japonicus chitin receptor CERK613 (FIG. 2D). Intriguingly, a search in the Protein Data Bank (PDB) revealed that M1 in EPR3 ED had no close structural homologs, while M2 was associated with LysM structures, and LysM3 was classified as a standard LysM motif (Holm, L. & Rosenström, P. Nucleic Acids Research 2010 38:W545-9; Krissinel, E. & Henrick, K. in Computational Life Sciences (Springer Berlin Heidelberg) 2005 3695: 67-78).

### Structure of the EPR3 C-terminus

[0178] X-ray scattering (SAXS) experiments were performed to determine the structure of the C-terminus of EPR3 ED and to validate the EPR3 ED structure in solution (FIGS. 3A-3C and Table 2).

TABLE 2
SAXS data collection and scattering-derived parameters

| | | |
|---|---|---|
| | EPR3 + R7A | EPR3 + R7A |
| EPR3 | EPS | exoU EPS |

Data collection

| | | | |
|---|---|---|---|
| Beamline | PETRA III P12 | PETRA III P12 | PETRA III P12 |
| Wavelength (nm) | 1.24 | 1.24 | 1.24 |
| s range (nm⁻¹) | 0.0531-3.5526 | 0.1693-3.5996 | 0.0780-3.6134 |
| Exposure time (s) | 0.045 | 0.045 | 0.045 |
| Concentration range (mg/ml) | 0.6-22 | 0.6-22 | 0.6-22 |
| Ligand concentration (M) | N/A | 0.001 | 0.001 |
| Temperature (° C.) | 20 | 20 | 20 |

Structural parameters

| | | | |
|---|---|---|---|
| Rg (nm) from Guinier | 2.25 ± 0.6 | 2.21 ± 0.14 | 2.22 ± 0.25 |
| Rg (nm) from P(r) plot | 2.25 ± 0.02 | 2.18 ± 0.02 | 2.21 ± 0.02 |
| Dₘₐₓ (nm) | 7.34 | 6.73 | 7.27 |
| Porod volume estimate (Å³) | 52.6 | 49.8 | 50.7 |
| Estimated molecular mass from | 31.0 | 29.3 | 29.8 |
| Porod volume (kDa) | | | |
| Estimated molecular mass from | 24.7 | 24.7 | 24.7 |
| forward scattering I(0) (kDa) | | | |
| Calculated molecular mass from | 23.6 | 23.6 | 23.6 |
| amino acid sequence (kDa)* | | | |
| Estimated mass of glycosylated | 25-35 | 25-35 | 25-35 |
| EPR3 from SDS-PAGE (kDa) | | | |

Software employed

| | |
|---|---|
| Primary data reduction | Primus |
| Ab initio analysis | DAMMIF/DAMMIN |
| Rigid body modeling | Situs/colours |
| Visualization | PyMOL |

[0179] Surprisingly, the distance distribution showed that EPR3 ED in solution was almost twice the length of the crystal structure, but maintained the same molecular weight (FIG. 3C). The low-resolution SAXS envelope revealed a globular volume with a protruding stem-like structure at one end (FIG. 3D). The crystal structure of EPR3 ED accommodated into the globular part of the envelope and the missing C-terminal residues were modelled with good molecular fits into the stem-like structure (FIG. 3A, FIG. 3D). Interestingly, the EPR3 ED stem-like structure was well-defined in solution, similar to what was observed for NFP (unpublished data). The stem region shows conservation among EPR3 homologues both in terms of length and composition, which is dominated by glycine and positively charged lysine and arginine residues (FIG. 3F). Without wishing to be bound by theory, these results suggested that these receptors were positioned with a spacer to the plasma membrane potential important for efficient signaling (FIG. 3E).

### Structurally Unique EPR3 ED M1 Domain Defines a New Class of Receptors

[0180] The primary sequence and secondary structure of EPR3 ED, with unique N-terminal M1 (βαβ) and atypical M2 (βαβ) folds, followed by a classical LysM3 domain (βααβ) was highly conserved and defined a novel class of receptors (FIGS. 4A-4C, FIGS. 5A-5C). This class of receptors was not only restricted to legumes, but was also present in non-legume and monocot plants (FIGS. 4A-4C), suggesting that surveillance of EPS, or other microbial surface polysaccharides, was a widely conserved plant trait. To solidify this observation, the small (˜43 residue) M1 domain was modelled in the EPR3 homologs using atomic-level force field simulations. The related receptors shared the same topology and βαββ fold, and all modelled domains superpositioned extraordinarily well with the M1 domain in L. japonicus EPR3 (FIGS. 5A-5C). M1 of these receptors formed a surface exposed β-sheet structurally different from all known carbohydrate-binding domains identified in nature so far (Hashimoto, H. Cell. Mol. Lift. Sci. 2006 63: 2954-2967). As shown in FIG. 6, the comparison to the chitin receptor CERK6 ectodomain and the LCO receptor NFP ectodomain clearly indicated that EPR3 ED defined a distinct class of receptors.

[0181] Together, these results demonstrated that the M1-M2-LysM3 configuration of EPR3 ED defined a conserved class of new receptors that ware evolutionarily distinct from the chitin and LCO LysM receptors.

### Example 2: Determining the Specificity of EPR3

[0182] The following example describes microscale thermophoresis (MST) experiments measuring the ability of EPR3 to bind and distinguish between EPS of different structure and composition in solution.

### Materials and Methods

### Characterization of Exopolysaccharides (EPS) Ligands

[0183] Low molecular mass (LMM) exopolysaccharides (EPS) were isolated from various rhizobial strains including Mesorhizobium loti strain R7A ndvB6, R. leguminosarum bv. viciae 3855 (this work) and Sinorhizobium meliloti B578 (Griffins, J. S. et al. Mol. Microbiol. 2008 69: 479-490) that were deficient in cyclic glucan production were grown on minimal media with glucose as the sole source of carbon. The LMM EPS was isolated from the bacterial culture supernatants and purified via sequential precipitation with 6 volumes of 99.8% EtOH (v/v), followed by 9 volumes EtOH (v/v) and purified by size exclusion chromatography (SEC) as previously described (Muszyński, A. et al. J. Biol. Chem. 2016 291: 20946-20961). O-acetyl groups were removed chemically by mild overnight treatment of native EPS samples with 12.5% NH₄OH (Muszyński, A. et al. J. Biol. Chem. 2016 291: 20946-20961). Native and de-O-acetylated samples were verified via matrix-assisted laser desorption/ionization time of flight mass spectrometry (MALDI-TOF MS) analysis on Applied Biosystems AB SCIEX TOF/TOF 5800 system in either negative or positive reflector ionization modes. The glycosyl composition and linkage was determined as previously described (Muszyński, A. et al. J. Biol. Chem. 2016 291: 20946-20961). Proposed structures of the EPS ligands and results of MALDI-TOF MS are shown in FIGS. 7A-7F.

Native and de-O-acetylated R7A EPS

[0184] It was previously demonstrated that M. loti strain R7A produces a LMM EPS that is structurally similar to high-molecular mass EPS polymer, and is an O-acetylated octasaccharide with the structure (2,3/3-OAc)β-D-RibfA-(1→4)-a-D-GlcpA-(1→4)-β-D-Glcp-(1→6)-(3OAc)β-D-Glcp-(1→6)-(2OAc)β-D-Glcp-(1→4)-(2/3OAc)β-D-Glcp-(1→4)-β-D-Glcp-(1→3)-β-D-Galp, and the average molecule is substituted with three O-acetyl groups at four glycosyl residues in a non-stoichiometric ratio (Muszyński, A. et al. J. Biol. Chem. 2016 291: 20946-20961). The experiment was repeated, showing similar structural properties of the isolated LMM EPS. In particular, MALDI TOF-MS analysis confirmed that the average molecular [M-H]⁻ mass of the R7ΔAndvB EPS was m/z 1437.40, consistent with RibAGlcAGlc₅GalOAc₃ (FIG. 7A). De-O-acetylation of the wild-type native R7AAndvB EPS resulted in a shift of molecular mass from m/z 1437.40 to m/z 1311.18. This is consistent with loss of all 3 O-acetyl groups from RibAGlcAGlc5Gal octasaccharide (FIG. 7B).

R7A exoU EPS

[0185] In addition, low molecular mass oligosaccharides from the supernatant of a minimal media culture of the exoU mutant of M. loti strain R7A were isolated. This strain was described as defective in the expression of the putative Glc transferase involved in the addition of sixth hexose in the biosynthesis of the R7A EPS precursor (Kelly, S. J. et al. Mol. Plant Microbe Interact. 2013 26: 319-329). Composition and glycosyl linkage analysis showed the presence of 3-linked Galp, 4-linked Glcp, 6-linked GlcA, and terminally linked Glcp. Positive ionization mode MALDI-TOF MS analysis demonstrated major [M+Na]⁺ ion at m/z 935.33 that likely corresponds to the Glc₄Gal pentasaccharide substituted non-stoichiometrically with two O-acetyl groups out of three possible acetylation sites (FIG. 7C).

### Chitohexose (CO6)

[0186] CO6 were Obtained from Megazyme (FIG. 7D).

R. leguminosarum EPS

[0187] An ndvB mutant of Rhizobium leguminosarum bv. viciae 3855 was constructed by insertion of a suicide vector into the ndvB gene as previously described (Kelly, S. J. et al. Mol. Plant Microbe Interact. 2013 26: 319-329). Native R. leguminosarum 3855 ndvB EPS SEC purification of 9 volumes EtOH precipitated EPS yielded one major low molecular mass fraction (LMM EPS). R. leguminosarum 3855 (this work) R. leguminosarum bv. viciae 3855, produces EPS in an octasaccharide polymer consisting of five D-glucose, two D-glucuronic acid, and one D-galactose residues substituted with three 2-O-acetyl (or 3-O-acetyl), two 4,6-pyruvyl and one hydroxybutanoyl group (Philip-Hollingsworth, S. et al. J. Biol. Chem. 1989 264: 5710-5714; Robertsen, B. K. et al. Plant Physiol. 1981 67: 5710-5714; O'Neil, M. A. et al. J. Biol. Chem 1991 266: 9549-9555). Composition and glycosyl linkage analysis indicated the presence of 4-linked Glcp, 6-linked Glcp, 4-linked GlcpA, 4,6-linked Glcp, 4,6-linked Galp 3,4,6-linked Glcp (all branching sugars likely due to 4,6 substitution with pyruvate), and terminally linked Glcp. Negative ionization mode MALDI-TOF MS analysis demonstrated a heterogeneous mixture of Hex₆HexA₂ octasaccharide with a different number of non-carbohydrate substituents, and major [M-H]⁻ ion at m/z 1656.37, likely due to the fact that octasaccharide was substituted with two O-acetyl and two 4,6-pyruvyl groups. The structures substituted with hydroxybutanoate were also detected, but these are not major moieties (FIG. 7E).

S. meliloti EPS

[0188] SEC purification of precipitated S. meliloti EPS yielded one major low molecular mass fraction (LMM EPS). S. meliloti B587 is an ndvB mutant of Rm1021 that is proposed to be deficient in cyclic glucan production while producing normal EPS (Griffitts, J. S. et al. Mol. Microbiol. 2008 69: 479-490). The Rm1021 EPS (succinoglycan) or EPS I is an octasaccharide polymer consisting of seven D-glucose and one D-galactose residues substituted with 6-O-succinyl, 6-O-acetyl, and 4,6-puryvyl groups (Reinhold, B. B. et al. Journal of Bacteriology 1994 176: 1997-2002; Choulry, C. et al. Int. J Bio. Macromol. 1995 17:357-363; Wang, L. X. et al. Journal of Bacteriology 1999 181: 6788-6796). Composition and glycosyl linkage analysis indicated the presence of 3-linked Galp; 4-linked Glcp; 6-linked Glcp; 3-linked Glcp, 4.6-linked Glcp (likely due to 4,6 substitution with pyruvate). Consistent with early reports (Griffitts, J. S. et al. Mol. Microbiol. 2008 69: 479-490), no 2-linked glucose was detected, confirming there was no cyclic glucan production. Negative ionization mode matrix-assisted laser desorption/ionization time of flight mass spectrometry (MALDI-TOF MS) analysis indicated major [M-H]⁻ ion at m/z 1525.20. This ion corresponds to octasaccharide composed of eight hexose residues substituted with O-acetatyl, 4,6-pyruvyl and succinyl groups (Hex8OAcOSucPyr) (FIG. 7F).

### Microscale Thermophoresis (MST) Binding Experiments

[0189] Purified EPR3 was fluorescently labeled using the Monolith NT.115TM Protein Labelling Kit Blue NHS (NanoTemper Technologies) according to the manufacturer's instructions. All experiments were performed in MST buffer (50 mM K2PO4, pH 7.8, 500 mM NaCl, and 0.05% Tween-20) with a constant concentration of EPR3 ED (100 nM and ˜50% labelling efficiency) and dilution series of the various ligands. The samples were incubated for 30 minutes at room temperature before loaded into standard capillaries for measurements on a Monolith NT.115 TM instrument (NanoTemper Technologies) at 25° C., with blue LED power of 50% and MST power of 20%. To accurately measure the experimental errors and ensure data reproducibility, all MST binding experiments were performed with at least three independently purified samples of EPR3. At the highest ligand concentrations, weak ligand binding to the fluorescent label itself was occasionally observed. To accurately account for this unspecific binding ligand binding to 50 nM free fluorescent label was measured and this small background was subtracted contribution from all the respective MST binding measurements. The competition experiments were performed by pre-incubating labeled EPR3 ED with 250 μM R7A EPS or R7A exoU EPS and assessing the binding of EPR3 ED to titrated R7A exoU EPS or R7A EPS, respectively. Binding data were processed with the GraphPad Prism 7 software (GraphPad Software, Inc.) and the equilibrium dissociation constants (K_{d}) values (95% confidence interval) were calculated using the sigmoidal dose-response equations.

### Small-Angle X-Ray Scattering (SAXS)

[0190] EPR3 ED was purified by gel filtration in gel filtration buffer and a monodisperse peak fraction was collected and used for SAXS measurements. Scattering from EPR3 ED samples (either with no ligand or with R7A EPS (1 mM) or R7A exoU EPS (1 mM) added) at concentrations ranging from 0.6-22.0 mg/ml were collected at the EMBL P12 beamline PETRA III in a temperature-controlled cell (20° C.) at a wavelength of 1.24 Å. Normalization, radial averaging and buffer subtractions were done at the beamline using the automated pipeline. Data analysis and ab initio low resolution modelling were performed in DAMMIN (Svergun, D. I. Biophysical Journal 1999 76: 2879-2886). The scattering, Guinier plots and P(r) distance distribution plots were prepared with the GraphPad Prism 7 software. To detect if ligand binding affected EPR3 ED oligomerization as a potential signaling mechanism, the solution SAXS of EPR3 ED in the R7A EPS or R7A exoU EPS-loaded state were solved.

### Results

[0191] EPR3 ED bound the monomeric octasaccharide R7A EPS (from the rhizobium species M. loti, a species compatible with L. japonicus for root nodule formation) with an equilibrium dissociation constant (K_{d}) of 38.1±7.5 μM (FIGS. 8A and 10A). Interestingly, EPR3 ED also bound the incompatible truncated R7A exoU EPS pentasaccharide with even 6-fold higher affinity (K_{d} of 6.1±1.5 μM) compared to R7A EPS (FIG. 8B).

[0192] To detect if ligand binding affected EPR3 ED oligomerization as a potential signaling mechanism, the solution SAXS of EPR3 ED in the presence of R7A EPS or R7A exoU EPS-loaded state was solved. The scattering measurements and ab-initio reconstructions showed that the ligand-bound receptor retained its monomeric state with the same overall structure, dimensions and stem arrangement as the ligand-free state (FIGS. 10A-10C and Table 2). Together, the data showed that EPR3 ED was able to bind both compatible and incompatible EPS while maintaining a monomeric structure. Without wishing to be bound by theory, this suggested that the observed phenotype of impaired infections in L. japonicus, alfalfa, and pea inoculated with EPS-defective bacterial symbionts related to the ligand-induced ability of the receptor to activate downstream signaling.

[0193] To investigate ligand-selectivity, it was assessed whether EPR3 ED bound the immune-response-inducing chitin polymers (C06) known to be perceived by canonical LysM receptors (Bozsoki, Z. et al. Proc. Natl. Acad. Sci. U.S.A. 2017 114: E8118-E8127; Liu, T. et al. Science 2012 336: 1160-1164; Liu, S. et al. Structure 2016 24: 1192-1200). Results showed that EPR3 ED was unable to bind C06 (FIG. 8C), supporting the structural data that EPR3 belonged to a unique class of receptors. The N-acetyl groups of chitin polymers have been demonstrated to be important contact points for LysM proteins (Liu, T. et al. Science 2012 336: 1160-1164; Hayafune, M. et al. Proc. Natl. Acad. Sci. U.S.A. 2014 111: E404-13; Wong, J. E. M. M. et al. FEBSJ 2014 281:1196-1208; Sanchez-Vallet, A. et al. Elife 2013 2: e00790) and therefore whether corresponding O-acetyl groups in EPS were important moieties recognized by EPR3 ED was investigated. However, chemical removal of the O-acetyl groups in R7A EPS (deOAc-EPS) did not affect binding, as EPR3 ED bound R7A deOAc-EPS with a K_{d} of 31.3±11.7 μM, similar to that of fully O-acetylated R7A EPS (FIG. 8D). This suggested a difference in the ligand perception mechanism between EPR3 ED and classical LysM receptors binding chitinous ligands, e.g. AtCERK1 (Liu, T. et al. Science 2012 336: 1160-1164). In the crystal structure of AtCERK1, the position of chitin in the LysM2 binding pocket allowed the carbonyl oxygen of the N-acetyl moieties to form hydrogen bonds with backbone-amide-nitrogens of the main chain (Liu, T. et al. Science 2012 336: 1160-1164). Such rigorous recognition was unlikely for the O-acetyl groups in EPS as EPS is non-stoichiometrically O-acetylated, in contrast to chitin, which has a uniform distribution of N-acetyl groups.

[0194] Supporting this notion, monomeric octasaccharide EPS from both R. leguminosarum and S. meliloti that have different O-acetylation patterns were purified and characterized (FIGS. 7A-7F). These rhizobia do not normally infect L. japonicus but interestingly, EPR3 ED still bound R. leguminosarum octasaccharide EPS with a K_{d} of 9.0±3.7 μM (FIG. 8E) and S. meliloti EPS (succinoglycan) with a K_{d} of 221.9±102.3 μM (FIG. 8F-8G), which showed that EPR3 was a promiscuous receptor capable of binding EPS from different bacterial species. Perception of compatible EPS in legumes is believed to promote infection of bacteria and to deny root entry of incompatible strains (Kawaharada, Y. et al. Nature 2015 523: 308-213; Kawaharada, Y. et al. Nat Commun. 2017 8: 14534; Kelly, S. J. et al. Mol. Plant Microbe Interact. 2013 26: 319-329). The data suggested that ligand binding per se was not the sole discriminating factor for eliciting a response to compatible or incompatible bacteria.

[0195] In summary, EPR3 was a defining member of a large and conserved new class of plant receptors able to directly perceive EPS from different bacterial species. The evolutionary conservation observed highlighted a widespread requirement for recognition of EPS or other microbial surface polysaccharides in plants.

### Example 3: Identification and Characterization of Epr3a, a Homolog of Epr3

[0196] The following example describes the identification of Epr3a, a homolog of Epr3 in L. japonicus that shares 65% amino acid identity with Epr3a. Further, the following example describes the generation of mutations in both Epr3a and Epr3 in L. japonicus, and functional and phenotypic studies of the two genes.

### Materials and Methods

### Identification of Epr3a

[0197] L. japonicus Epr3a was identified based on its 65% amino acid identity to Epr3 (FIG. 11B).

### Mutant Alleles of Epr3 and Epr3a and Plant Lines

[0198] Lotus retrotransposon 1 element LORE1 mutant alleles of Epr3 and Epr3a were isolated from the LORE1 mutant resource (https://lotus.au.dk/). FIG. 11A shows a schematic of the LORE1 locations in the Epr3 and Epr3a genes. Homozygous mutants were identified through PCR-based genotyping.

[0199] A double mutant was isolated from crosses of epr3-11 and epr3a-2 mutants. Homozygous double mutants were identified through PCR-based genotyping.

### EPR3a ED Purification

[0200] The EPR3a ED was expressed in insect cells, and the protein was purified as described in Example 1 (FIG. 11D).

### EPR3 and EPR3a Kinase Domain Purification

[0201] The EPR3 and EPR3a kinase domains were expressed in E. coli, and the proteins were purified. EPR3 and EPR3a kinases were expressed in E. coli LOBSTR cells that were grown to an optical density of 0.6 at 600 nm before protein expression was induced with 0.2 mM IPTG at 18° C. overnight. Cells were lysed in buffer containing 50 mM Tris-HCl pH 8.0, 500 mM NaCl, 20 mM imidazole, and 1 mM benzamidine, and the cleared supernatant was loaded onto a Ni Sepharose 6 FF affinity column (GE Healthcare) and washed prior to elution in lysis buffer supplemented with 500 mM imidazole. Purification tags on EPR3 and EPR3a kinases were enzymatically removed with 3C protease and the proteins were finally purified on a Superdex 75 10/300 gel filtration column (GE Healthcare) in gel filtration buffer containing 50 mM Tris-HCl pH 8.0 and 200 mM NaCl.

### EPR3 and EPR3a Kinase Activity Assay

[0202] Proteins were incubated with 100 nCi [γ32-P]ATP (PerkinElmer) in 50 mM Tris.HCl, pH 8, buffer containing 10 mM MgCl2, 5 mM MnCl2, and 20 μM cold ATP at room temperature for 1 h. The samples were then separated on SDS/PAGE gels, which were exposed overnight on phosphor plates (Molecular Dynamics). The phosphor plates were scanned with the typhoon TRIO scanner (Amersham Biosciences). The kinase activity assay results are shown in FIGS. 11K-11M.

### Microscale Thermophoresis (MST) Binding Experiments

[0203] MST experiments were performed as described in Example 2 (FIG. 11C, FIGS. 11E-11J).

L. japonicus Gene Expression Profiling by RNA-Seq

[0204] Epr3 and Epr3a expression was measured across L. japonicus tissue types using RNA-seq. Wild-type L. japonicus was treated with water or the symbiotic bacteria M. loti strain R7A. For tissues treated with M. loti strain R7A, RNA was collected either 1, 3, 7, or 21 days following treatment with M. loti strain R7A (FIG. 12). Total RNA was extracted using a NucleoSpin® RNA Plant kit (Macherey-Nagel) according to the manufacturer's instructions. RNA quality was assessed on an Agilent 2100 Bioanalyser and samples were sent to GATC-Biotech for library preparation and sequencing. Reads were mapped to the L. japonicus v. 3.0 genome and differential gene expression was analyzed using CLC Genomics Workbench 9.5.3 (Qiagen). For each sample, a minimum of 30 million reads were obtained with >90% of reads mapped to the reference genome. Relative expression levels of Epr3 and Epr3a was calculated in shoots, nodules, nodule primordia, root hairs, and roots.

### Plate Nodulation Assay

[0205] L. japonicus plants were grown on agar with or without the addition of M. loti strain R7A, and the number of nodules per plant was counted (FIGS. 13A-13B). Seeds were scarified with sandpaper, surface sterilized in 0.5% bleach, and germinated on wet filter paper for 3 days. Seeds with emerging radicles were transferred to square Petri dishes (Sigma-Aldrich) with agar slopes containing 0.25× B&D medium. The plate medium was solidified with 1.4% Agar Noble (Difco) and the surface of the slope was covered with filter paper (AGF 651, Frisenette ApS). A metal bar with 3-mm holes for roots was inserted at the top of the agar slope. Plates were incubated in an upright position in specially fabricated boxes, excluding light from the roots below the metal bar. Plants were incubated at 21° C. under a 16 h light/8 h dark cycle. Plates containing ten plants each were inoculated with 750 μl of M. loti at an optical density of OD₆₀₀=0.02.

### Nodules Per Plant

[0206] The number of root nodules formed per L. japonicus plant was counted (FIG. 14A, FIG. 15A, FIG. 16A).

### Plant Shoot Weight

[0207] Plant shoot weight was measured at the conclusion of nodulation assays by separating the shoot from the root and weighing on a fine-balance scale (FIG. 14B, FIG. 15B, FIG. 16B).

### Infection Threads

[0208] The number of infection threads formed during the development of L. japonicus root nodules was counted (FIG. 17). Roots used for counting infection threads were inspected using a Zeiss Axioplan 2 image fluorescence microscope.

qRT-PCR

[0209] qRT-PCR was performed to measure the absolute expression of the symbiotic genes Gh3. 3, Nfyal, and NpI. Wild-type L. japonicus (Gifu) or L. japonicus with mutations in epr3 and/or epr3a were treated with water or M. loci strain R7A, and symbiotic gene expression was measured at 3 and 7 days post treatment (FIGS. 18A-18C). RNA was isolated using the NucleoSpin RNA Plant kit (Macherey-Nagel). RevertAid Reverse Transcriptase (Thermo) was used for cDNA synthesis according to the manufacturer's protocols. All cDNA samples were tested for genomic DNA contamination using primers specific for the NIN gene promoter. A LightCycler480 instrument and LightCycler480 SYBR Green I master (Roche Diagnostics) were used for the real-time quantitative PCR. ATP synthase and ubiquitin-conjugating enzyme were used as reference genes. The cDNA starting concentration for each gene was calculated using per amplicon PCR efficiency calculations calculated using LinRegPCR. Target genes were compared with the geometric mean of the housekeeping genes for each of three biological repetitions (each consisting of 10 plants). At least two technical replicates were performed in each analysis.

### Results

### Characterization of Epr3a

[0210] The EPR3a ED was purified and tested for binding M. loti EPS in a MST experiment (FIG. 11C). EPR3a ED bound M. loti EPS with an equilibrium dissociation constant of Kd=25.6 μM, indicating that, like EPR3, EPR3a is an EPS-binding proteins.

[0211] Further, the EPR3a ED was purified, resulting in a pure and monodisperse preparation suitable for biochemical studies, as shown in FIG. 11D. MST experiments were performed to test the ability of the EPR3a ED preparations shown in FIG. 11D to bind M. loti EPS, M. loti de-O-acetylated EPS, S. meliloti EPS, R. leguminosarum EPS, chitin (chitotetraose), or maltodextrin (FIGS. 11E-11J). The EPR3a ED bound to M. loti EPS with an equilibrium dissociation constant of K_{d}=44.4±11.2 04 (FIG. 11E), to M. loti de-O-acetylated EPS with an equilibrium dissociation constant of K_{d}=57.2±15.6 04 (FIG. 11F), to S. meliloti EPS with an equilibrium dissociation constant of K_{d}=936.7±389.4 04 (FIG. 11G), and to R. leguminosarum EPS with an equilibrium dissociation constant of K_{d}=12.5±4.0 04 (FIG. 11H). As shown in FIGS. 11I-11J, the EPR3a ED did not bind to chitin or maltodextrin.

### Comparison of Kinase Activity of Epr3 and Epr3a

[0212] EPR3 and EPR3a kinase domains were purified from E. coli, and their kinase activities was measured. As shown in FIGS. 11K-11M, the kinase domains of both EPR3 and EPR3a showed robust kinase activity, including both auto-phosphorylation activity and phosphorylation of an acceptor protein (MBP).

### Comparison of Expression of Epr3 and Epr3a

[0213] Analysis of L. japonicus RNA-seq data and qRT-PCR results showed that in roots, Epr3 expression was induced by M. loti strain R7A, whereas Epr3a was expressed in un-inoculated (i.e., H₂O-treated) roots. Epr3 and Epr3a ware both expressed in M. loti strain R7A-treated nodule primordia. Epr3a was expressed at a low level in root tissues and its transcription did not respond to rhizobial inoculation (note that FIG. 12 shows relative expression, so the expression appears high in the root relative to the shoot), whereas Epr3 expression was upregulated upon treatment with M. loti strain R7A (FIG. 12). Expression of Epr3a was highest in nodule primordia and mature nodules compared to other root tissues (FIG. 12).

Phenotypic Comparison of Wild-Type L. japonicus to L. japonicus with Mutant Epr3 and/or epr3a

[0214] Symbiotic phenotyping of epr3a single mutants shows a reduction in nitrogen-fixing nodule formation and a severe reduction in the number of infection threads formed with the compatible symbiont M. loti strain R7A (FIG. 14A). The epr3/epr3a double mutant showed a reduction in infection thread formation/symbiotic phenotype compared to wild-type, but the reduction was not as severe as the reduction in infection thread formation in the single mutants epr3a-1 and epr3a-2 (FIG. 17). Comparable effects on symbiotic phenotypes were observed with the EPS-deficient M. loti strain R7AexoY/F mutant (FIG. 15A). epr3, epr3a, and epr3/epr3a double mutants were able to form nodules in association with M. loti strain R7exoU that produces a truncated EPS, while the wild-type L. japonicus Gifu was not (FIG. 16A).

### Induction of Symbiotic Genes

[0215] qRT-PCR analysis indicated that symbiotic gene induction in response to M. loti strain R7A was reduced in the epr3a single mutants, while in epr3 and epr3/epr3a double mutants the level of symbiotic gene induction was comparable to wild-type (FIGS. 13A-13B).

[0216] Epr3a and Epr3 exhibited genetic epistasis, as observed in the infection thread phenotype and symbiotic gene induction phenotypes in which the double mutation of both genes removed the defects observed in plants with Epr3a alone mutated (FIG. 17, FIGS. 18A-18C).

[0217] Overall, the results indicated that EPR3a and EPR3 were both EPS-receptors that were functionally important for interaction of L. japonicus with symbiotic bacteria. FIGS. 19A-19B and FIGS. 33A-33B each provide models for symbiosis signalling with EPR3a and EPR3.

### Example 4: L. japonicus EPR3 Functions in Shaping Soil Microbiota Diversity

[0218] The following example describes a comparison of the root microbiota from soil-grown L. japonicus wild-type (Gifu) and mutant plants impaired for exopolysaccharide perception (epr3).

[0219] Materials and Methods

16S rRNA Sequencing of Bacterial Communities

[0220] Wild-type (ecotype Gifu) L. japonicus and mutant L. japonicus in Epr3 (epr3-1 1, epr3-10 and epr3-13) were cultivated in parallel, in natural soil. Bacterial communities of unplanted soil, rhizosphere, and endosphere/root compartments of wild-type and epr3-13 genotypes at bolting stage were characterized following the established protocol (Zgadzaj, R. et al. P Natl Acad Sci USA 2016 113: E7996-E8005). Visible nodules and root primordia were removed from the roots prior to sample processing for community profiling. The V5-V7 hypervariable region of the bacterial 16S rRNA gene was amplified from the aforementioned compartments and genotypes and sequenced using Illumina technology. Low-quality reads were removed, and chimeras and sequences were assigned to plant-derived organellar DNA. Three biological and three technical replicates were sequenced.

### Operational Taxonomic Unit (OTU) Clustering

[0221] The identified V5-V7 amplicons were clustered into Operational Taxonomic Units (OTUs) at 97% sequence similarity. In order to determine the effect of EPR3 mutation on the composition of bacterial communities, the observed community shifts were dissected by arranging OTUs according to their taxonomic assignment.

### Calculation of α- and β-Diversity and OTU Enrichment

[0222] Information on the number and relative abundance of operational taxonomic units (OTUs) in each compartment was used to calculate α-diversity (Shannon index; within sample diversity) and β-diversity (Bray-Curtis distances; between samples diversity), OTU enrichment, and taxonomic composition in different compartments and genotypes. Rarefaction was conducted for each sample to calculate the Shannon index. According to the minimum read number in all of the samples, 14,041 reads rarefied from each sample. The script “alpha_diversity.py” in QIIME1 was used to calculate the Shannon index. Normalization of the OTU table was conducted to calculate the Bray-Curtis distances. The relative abundance of each OTU in each sample was employed as the normalization method. According to the OTU relative abundance, OTUs that were lower than 0.01% abundance were deleted before calculating Bray-Curtis distances. The script “beta_diversity.py” in QIIME1 was used to calculate Bray-Curtis distances. R script was used for the visualization of α-diversity and β-diversity.

### Canonical Analysis of Principle Components Coordinates

[0223] In order to assess the impact of the different host compartments and genotypes in community composition, a Canonical Analysis of Principle Components Coordinates (CAP) was performed. The function “capscale” in the R package “vegan” was employed to run the CAP analysis. The effect of biological replicates and technical replicates was partialled out.

### Results

[0224] Studies of microbial communities associated with healthy plants led to the paradigm that plant roots have an intrinsic capacity to attract and accommodate a selection of microbial taxa from the rich environment present in the soil for their own benefit (Bulgarelli, D. et al. Annu Rev Plant Biol 2013 64: 807-838). In order to determine the impact of EPR3 on root microbiota composition wild-type (ecotype Gifu) L. japonicus and L. japonicus mutant in Epr3 (epr3-11, epr3-10 and epr3-13; schematic shown in FIG. 20D) were cultivated in parallel, in natural soil. All plant genotypes appeared healthy and formed a large number of symbiotic root nodules (FIG. 20A). In spite of this apparent well-developed phenotype, the shoot length, shoot fresh weight and the number of nodules/plants of the epr3 mutant plants were significantly reduced in comparison to wild-type (FIG. 20B, FIG. 20C), suggesting that genetic disruption of EPR3 was detrimental for the fitness of plants grown in natural soil.

[0225] Analysis of α-diversity revealed a general reduction of complexity from unplanted soil to rhizosphere, endosphere/root and lastly the nodule compartments for bacterial communities which is consistent with previous studies from L. japonicus and A. thaliana microbial communities (Bulgarelli, D. et al. Nature 2012 488: 91-95; Lundberg, D. S. et al. Nature 2012 488: 86; Zgadzaj, R. et al. P Natl Acad Sci USA 2016 113: E7996-E8005). No significant difference was observed between mutant and wild-type, indicating no significant changes in diversity within samples (FIG. 21A).

[0226] In order to assess the impact of the different host compartment and genotypes in community composition, a Canonical Analysis of Principle Components Coordinates (CAP) was performed (FIGS. 21B-21C). This revealed a clear differentiation of bacterial communities in the tested plant genotypes in both endosphere/root and rhizosphere compartments, with the host genotype explaining as much as 8% of the overall variance of the 16S rRNA data (FIG. 21D; P<0.002). The rhizosphere and endosphere compartments of wild-type plants were found to harbor different bacterial communities that were separate from those of epr3 (FIG. 21C, FIG. 21D) illustrating a pronounced host genotype effect in addition to the compartment effect (36.9% of variance in the dataset is explained by compartment and genotype) for the root-associated bacterial communities. Interestingly, the analysis of β-diversity in the nodule compartment, revealed no significant differences between wild-type and mutant, indicating that a similar bacterial composition is hosted inside the symbiotic root organ (FIG. 21B).

[0227] In order to determine the effect of EPR3 mutation on the composition of bacterial communities, the observed community shifts were dissected by arranging OTUs according to their taxonomic assignment. This revealed that, with the exception of OTUs assigned to Burkholderiales or Rhizobiales, in both rhizosphere and endosphere only few OTUs assigned to other orders had a significant difference in their relative abundance between wild-type and epr3 mutant plants (FIGS. 22A-22B). Remarkably, a large number of OTUs belonging to Burkholderiales and Rhizobiales had a significantly reduced abundance in the endosphere/root and rhizosphere compartments of the epr3 mutant compared to wild-type, indicating a taxonomically selective depletion (FIGS. 22A-22B). In the rhizosphere compartment, 75 out of all 328 OTUs assigned to Burkholderiales and 42 out of all 199 OTUs assigned to Rhizobiales had a significantly larger abundance in wild-type compared to the epr3 mutant (FIGS. 22A-22B). Among the top 100 OTUs identified in the wild-type rhizosphere, 48 of 76 Burkholderiales OTUs and 11 of 15 Rhizobiales OTUs, together accounting for 0.66 total aggregated abundance, were depleted in the epr3-13 rhizosphere (FIGS. 23A-23D). A less pronounced, but still significant effect was identified in the endosphere/root compartment, where 12 of 38 Burkholderiales OTUs and 7 of 39 Rhizobiales OTUs from the top 100 most abundant OTUs in wild-type, had a reduced abundance in the mutant endosphere/root. In epr3 mutant endosphere/root and rhizosphere, the depletion of a large number of Burkholderiaceae and Oxalobacteraceae taxa was accompanied by a concomitant enrichment of members from Comamonadaceae, suggesting compensatory niche replacement within the Burkholderiales community.

[0228] The Rhizobiales OTU1, which is the most abundant bacterial taxa detected in wild-type and epr3 nodules (93.9% RA) was found more abundant in the epr3 mutant endosphere/root (RA=0.11) when compared to wild-type (RA=0.04) (FIG. 24). Detailed microscopic studies of the infection pattern manifested by compatible symbionts in L. japonicus epr3 mutants revealed an impaired progress of infection from the epidermal into the nodule cortex (Kawaharada, Y. et al. Nature 2015 523: 308-312). The observed increased abundance of OTU1 in the epr3 endosphere/roots could reflect a similar pattern for the compatible symbiont present in this native soil. Its ability to initiate root infection seems not to be restricted by mutation of EPR3, but, like M. loti R7A model strain, it may remain blocked during infection of the root compartment leading to reduced nodulation.

[0229] Members of Burkholderiales and Rhizobiales have been designated keystone taxa due to their large prevalence, and abundance in different environments (Thompson, L. R. et al. Nature 2017 551: 457-463). However, there is only detailed knowledge on particular members of these two orders: the symbiotic diazotrophs and the pathogenic isolates (Angus, A. A. et al. PLoS One 2014 9: e83779; Chen, W. M. et al. J Bacteriol 2003 185: 7266-7272; Denny, T. in Plant-Associated Bacteria 2007). These represent only a small fraction of the overall Burkholderiales and Rhizobiales taxonomic units found to be habitual colonizers (endophytes) of healthy plant roots (Banerjee, S. et al. Nat Rev Microbiol 2018 16: 567-576; Garrido-Oter, R. et al. Cell Host Microbe 2018 24: 155-167). Currently, the molecular bases accounting for their prevalence and abundance across diverse range of environments are not known, nor their contribution to plant growth and development.

[0230] The results provided the first genetic evidence that a plant host was able to enrich for specific members of two of bacterial orders from the soil biome. EPS perception by the EPR3 receptor in L. japonicus enabled colonization of endosphere/root and rhizosphere by distinct members of Burkholderiales and Rhizobiales leading to increased plant fitness.

### Example 5: Engineering Modifications of Epr3 and Epr3a

[0231] The following example describes the genetic engineering of Epr3 in plants such as cowpea, soybean, cassava, rice, soy, wheat, and tobacco.

### Materials and Methods

### Materials and Methods Relevant for Engineering Modifications of Epr3 and Epr3a

[0232] The EPS-binding specificity of engineered alleles of EPR3 and EPR3a are characterized as described in Example 2.

[0233] The soil microbiota of the transformed plant lines are characterized as described in Example 4.

### Results

### Genetic Engineering Endogenous Epr3 or Epr3a in Plants

[0234] A genetically altered allele of Epr3 or Epr3a is introduced into a crop plant, replacing one or more endogenous copies of Epr3 or Epr3a. The composition of the rhizosphere and root bacterial communities are measured by 16S rRNA sequencing. Crop plants with altered Epr3 or Epr3a will affect the composition of the rhizosphere and/or root bacterial community differently than plants with wild-type Epr3 or Epr3a.

### Generating Chimeric Alleles of Epr3 in Plants

[0235] A chimeric allele of Epr3 with an M1 domain from a homologous Epr3 gene, or an ectodomain sequence from a homologous Epr3 gene is introduced into a crop plant. The composition of the rhizosphere and root bacterial communities are measured by 16S rRNA sequencing. Crop plants with chimeric Epr3 will affect the composition of the rhizosphere and/or root bacterial community differently than plants with wild-type Epr3.

### Insertion of an Extra Copy Epr3 or Epr3a in Plants

[0236] An extra, exogenous copy of Epr3 or Epr3a is inserted into a crop plant. The composition of the rhizosphere and root bacterial communities are measured by 16S rRNA sequencing. Crop plants with an extra copy of Epr3 or Epr3a will affect the composition of the rhizosphere and/or root bacterial community differently than plants with a wild-type number of Epr3 or Epr3a genes.

### Enriching for Commensal Bacteria in Soil

[0237] Crop plants with genetically altered Epr3 alleles or copy numbers are grown. The composition of the soil microbiota is measured by 16S sequencing. Crop plants with genetically altered Epr3 genes will affect the soil microbiota such that compatible bacteria are enriched in the plant's local environment.

### Screening for Compatible Commensal Bacteria

[0238] Binding to the EPR3 ED is used as a means of recognizing EPS produced by the commensal bacteria M. loti.

### Example 6: Exemplary Structural Alignment to Identify Novel EPR3 Receptors

[0239] One of skill in the art would have no difficulty applying the teachings of this disclosure to identify novel EPR3 receptors. Exemplary steps would be:

1. Align the amino acid sequence of the potential EPR3 receptor with one or more known EPR3 receptor sequences (as in FIGS. 4A-4C). The alignment is used to determine the position of the M1 domain, which is at the N-terminal end of the ectodomain. The position of the M1 domain corresponds to the position of the LysM1 domain in canonical LysM receptors (FIG. 6).

[0240] The M1 domain in L. japonicus EPR3 is 43 residues (EPR3 amino acid residues 55-97, NSLLYHISIGLKVEEIARFYSVNLSRIKPITRGTKQDYLVSVP), and can be aligned to identify new candidate M1 sequences.

2. An ab-initio protein structure prediction program such as Quark is used to predict the structure and fold of the new candidate M1 domain (Xu and Zhang Proteins 2012 80: 1715-1735).

[0241] The structure generated by the ab-initio protein structure prediction program is highly accurate, as shown in FIG. 5B. The output structure from Quark (Lotus EPR3 M1-modelled) shares the same topology, βαββ fold, and superpositions extraordinarily well with the M1 domain of Lotus EPR3 crystal structure (RMSD of 1.33 Å).

3. If the modeled M1 domain of the potential EPR3 receptor shares the same topology, βαββ fold, and superimposes well with the L. japonicus EPR3 M1 domain, it is a new EPR3 homolog.

### Example 7: Identification of EPR3 Receptors

[0242] The following example describes the identification of homologs of Epr3 and Epr3a genes in various plant species.

### Materials and Methods

### Identification of EPR3 Receptors

[0243] To identify homologs of EPR3 receptors, amino acid sequence alignments, ab-initio protein structure predictions, and structural modeling of the M1 domain were performed as described in Example 6. Lotus, Medicago, soybean, Parasponia, Trema, Populus, Malus, Fragaria, maize, rice, wheat, barley, Datisca, Lupinus, Arabidopsis, Brassica rapa, and Brassica napus genomes were analyzed, as shown in FIG. 29A.

### Results

[0244] Analysis of available plant genome sequences identified EPR3 and EPR3a paralogs in most plant species that form mutualistic associations (symbiosis) with arbuscular mycorrhizal fungi, ectomycorrhizal fungi, and/or plants engaging in symbiosis with rhizobia (FIG. 29A). Many plants, including both dicots and monocot, had two copies of the EPR3 class of receptors (FIG. 29A). This was true for important crops, including maize, rice, wheat and barley (FIG. 29A). Arabidopsis thaliana, Brassica rapa and Brassica napus, which do not form mutualistic associations, had neither EPR3 nor EPR3a genes (FIG. 29A).

[0245] Force field modelling of the M1 domain as a signature for this class of unique receptors revealed that all contained the 13413 fold. The conserved structure of the 13413 fold is shown for Lotus EPR3 and EPR3a in FIGS. 29B-29D.

### Example 8: Epr3a Functions in Arbuscular Mycorrhizal Symbiosis

[0246] The following example describes gene expression and phenotypic studies of Epr3a and Epr3 in L. japonicus. Further, a gene expression analysis of a M. truncatula EPR3/EPR3a-like gene is described.

### Materials and Methods

[0247] qRT-PCR

[0248] qRT-PCR was performed to measure the absolute expression of the phosphate transporter PT4 (a gene expression marker of arbuscular mycorrhizal symbiosis), Epr3a, and Epr3. Wild-type L. japonicus (Gifu) was inoculated with arbuscular mycorrhiza or a mock inoculation control, and gene expression was measured at 2, 7, 14, 21, or 28 days post inoculation (FIG. 30A). qRT-PCR was performed as described in Example 3, above.

### Epr3a Promoter Activity in Plant Roots

[0249] The Epr3a promoter was placed upstream of GUS and transformed into L. japonicus. Hairy root plants expressing the pEpr3a-GUS construct were inoculated with arbuscular mycorrhizal spores, and promoter activity was measured by measuring GUS activity (FIG. 30B). Further, the arbuscular mycorrhizae were labeled with fluorescently labeled wheat germ agglutinin (WGA) for visualization.

### Mutant Alleles of Epr3 and Epr3a and Plant Lines

[0250] Lines of L. japonicus with epr3 and/or epr3a mutations were used, as described in Example 3 (FIG. 31).

### Arbuscular Mycorrhizae Symbiosis Phenotypes

[0251] Wild type L. japonicus Gifu and L. japonicus with mutations in epr3 and/or epr3a were inoculated with arbuscular mycorrhizae. 6 weeks post inoculation, roots were ink-stained and observed under the 20× objective lens on a Zeiss Axioplan II light microscope. For each field of view observed, the occurrence of (% occurrence) fungal hyphae, arbuscules, and vesicles within plant cells was measured (FIG. 31).

### Results

[0252] qRT-PCR analysis indicated that expression of Epr3a was induced during arbuscular mycorrhizal symbiosis, while Epr3 showed no induction (FIG. 30A). The expression pattern of Epr3a mirrored that of the PT4 phosphate transporter, a gene expression marker of arbuscular mycorrhizae symbiosis (Harrison et al., Plant Cell 2002 14: 2413-2429). This expression pattern suggested that EPR3a was involved in arbuscular mycorrhiza symbiosis. Therefore, phenotypes related to symbiosis with arbuscular mycorrhiza were measured in L. japonicus lines with epr3 and/or epr3a mutations. epr3a single mutants and the epr3/epr3a double mutant showed a comparable, statistically significant reduction in fungal infection and arbuscule formation and an increase in the presence of arbuscular mycorrhizal vesicles (FIG. 31). No significant difference in arbuscular mycorrhizal symbiosis was observed in the epr3 mutant. Further, an analysis of the activity of the Epr3a promoter showed that it was expressed in L. japonicus roots during colonization with arbuscular mycorrhizae in the cell layer where arbuscules form (FIG. 30B).

[0253] Further, expression of the M. truncatula A17 EPR3/EPR3a-like gene MtrunA17_Chr5g0413071 (Lyk10) was measured during arbuscular mycorrhizal symbiosis by mining and analyzing RNA-seq data presented in Gobbato, E. et al. (Curr Biol 2012 22(23):2236-41). As shown in FIG. 32, expression of MtrunA17_Chr5g0413071 was elevated during arbuscular mycorrhizal symbiosis relative to a mock inoculation control.

[0254] Finally, a model for EPR3 and EPR3a signaling in root nodule symbiosis (RNS) and arbuscular mycorrhizal symbiosis (AMS) is presented (FIGS. 33A-33B). Symbiotic rhizobia bacteria induces EPR3, whereas arbuscular mycorrhizal fungi induces EPR3a. Both receptors contribute positive signaling to promote infection by compatible rhizobia in root nodule symbiosis, whereas only EPR3a contributes positive signaling for arbuscular mycorrhiza colonization in mycorrhizal symbiosis.

### Example 9: Analysis of Epr3a Function in Colonization by Non-Symbiotic Burkholderiales

[0255] The following example describes a phenotypic study of Epr3a in L. japonicus. Specifically, the ability of wild-type and epr3a mutant L. japonicus to support colonization by co-inoculated M. loti and Burkholderiales was tested.

### Materials and Methods

### Mutant Alleles of Epr3 and Epr3a and Plant Lines

[0256] The ability of wild-type L. japonicus (Gifu), and L. japonicus with epr3a (alleles epr3a-1 and epr3a-2), or epr3/epr3a double mutations (“DM” in FIGS. 34A-34B) to support colonization by various Burkholderiales bacteria was tested. Lines of L. japonicus with epr3a or epr3a and epr3 mutations were used, as described in Example 3 (FIG. 31).

Inoculation with M. loti and Burkholderiales Bacteria

[0257] 25 isolates of bacteria from Burkholderiales orders were co-inoculated with M. loti R7A exoU bacteria. The co-inoculated Burkholderiales belonged to the following genera: LjRoot223—Burkholderia; LjRoot280—Duganella; LjRoot194—Acidovorax; LjRoot230—Burkholderia; LjRoot241—Burkholderia; LjRoot70—Pseudoduganella; LjRoot29—Burkholderia; LjRoot1—Achromobacter; LjRoot131—Polaromonas; LjRoot296—Cupriavidus; LjRoot122—Massilia; LjRoot39—Pseudorhodoferax; and LjRoot294—Variovorax. M. loti R7A exoU bacteria were used because of their ability to induce infection threads, which allows other bacteria (e.g., Burkholderiales) to access the root endosphere. The number of infection threads induced by M. loti R7A exoU bacteria is variable between plants.

[0258] A gnotobiotic system was used that was made up of autoclaved magenta boxes filled with well-washed light expanded clay aggregate (LECA) substrate. Burkholderiales isolates were grown in liquid 10% TSB media in a 28° C. shaking incubator until the growth reached exponential stage. To limit the effect of secondary metabolites produced by bacteria, the liquid cultures of bacteria were washed twice and resuspended into ¼ B&D media. Then, OD₆₀₀ of each isolate was measured and adjusted to equal concentrations, and all bacteria were mixed together. The final OD₆₀₀ used for the inoculation was 0.02. For each genotype (Gifu, epr3a-1, epr3a-2, and the epr3epr3A double mutant), 5 biological replicates were used, and plants were allowed to grow with the inoculated bacteria for 4 weeks. At 28 days post inoculation all genotypes had formed nodule primordia, indicating that the M. loti symbiont was active and able to initiate the symbiotic process in the presence of the Burkholderiales isolates. Plants grown in the same magenta boxes were collected and washed with sterile water (two 30 second washes), 80% ethanol (one 30 second wash), and bleach (one 30 second wash) to remove bacteria from rhizoplane, then washed three times using sterile water to remove the ethanol and bleach.

### Measurement of Relative Abundance of Bacteria

[0259] The root and nodule primordia tissues from each plant were collected and homogenized by mortar grinding with liquid nitrogen. DNA was extracted using the FastDNA Spin kit for Soil (MP Bioproducts) according to the manufacturer's protocol. DNA concentrations were measured fluorometrically (Quant-iT™425 PicoGreen dsDNA assay kit, Life Technologies, Darmstadt, Germany) and adjusted to 3.5 ng/μl. The variable v5-v7 regions of the 16S rRNA gene were amplified based on MAUI-seq approach. Nextera XT barcode primers were used to distinguished samples. PCR products were purified, pooled and sequenced using an Illumina Iseq instrument. The reads were mapped to the 16S sequence of the input bacteria isolates, and relative abundances were calculated (FIG. 34A).

### Results

[0260] In order to investigate the role of EPR3a in the detection of associative, non-symbiotic bacteria, the ability of wild-type L. japonicus (Gifu), epr3a mutant (alleles epr3a-1 and epr3a-2), and epr3epr3A double mutant plants to support colonization by different members of Burkholderiales was tested (FIGS. 34A-34B). It was hypothesized that if EPR3a is important for root and nodule colonization by Burkholderiales isolates, then there would be differences in the abundance of Burkholderiales between wild-type and mutant plants.

[0261] As shown in FIGS. 34A-34B, in wild-type plants, the root and nodules were occupied almost exclusively by the symbiont M. loti. In contrast, in the epr3a and epr3/epr3a mutant plants, the relative abundance of M. loti was greatly reduced, with a corresponding increase in the abundance of LjRoot223, LjRoot280, LjRoot194, LjRoot230, LjRoot241 and LjRoot70 Burkholderiales isolates. This suggested that in wild-type plants, EPR3a prevents colonization of infection threads by associative, non-symbiotic bacteria belonging to Burkholderiales. Burkholderiales isolates LjRoot29, LjRoot1, LjRoot131, LjRoot296, LjRoot122, LjRoot39, and LjRoot294 did not show changes in abundance; their individual relative abundances are not shown in FIGS. 34A-34B, but their cumulative relative abundances were included in the values for total Burkholderiales in FIGS. 34A-34B.

[0262] Colonization of mutants varied among Burkholderiales isolates, and, without wishing to be bound by theory, it is predicted this was based on the capacity of the Burkholderiales isolates to produce compatible EPS. A great deal of variation was observed between the biological replicates, and the increase in Burkholderiales abundance in epr3a mutants was not found to be statistically significant. Without wishing to be bound by theory, it is believed that this large variability was due to the highly variable ability of M. loti R7A exoU bacteria to induce infection threads, thereby enabling other bacteria to access the root endosphere. The differences observed between wild-type and mutant plants, particularly for the total Burkholderiales, indicate that EPR3a acts to selectively modulate the root microbiota.

1. A genetically altered plant or part thereof comprising a first nucleic acid sequence encoding a heterologous EPR3a or EPR3a-like polypeptide or a modified EPR3a or EPR3a-like polypeptide, wherein the heterologous EPR3a or EPR3a-like polypeptide or the modified EPR3a or EPR3a-like polypeptide provides increased selectivity for a beneficial commensal microbe as compared to a wild-type plant under the same conditions.

2. The genetically altered plant or part thereof of claim 1, wherein the beneficial commensal microbe is a mycorrhizal fungi.

3. The genetically altered plant or part thereof of claim 2, wherein the plant or part thereof further comprises a second nucleic acid sequence encoding a heterologous EPR3 or EPR3-like polypeptide or a modified EPR3 or EPR3-like polypeptide, wherein the heterologous EPR3 or EPR3-like polypeptide or the modified EPR3 or EPR3-like polypeptide provides increased selectivity for a beneficial commensal microbe as compared to a wild-type plant under the same conditions.

4. The genetically altered plant or part thereof of claim 3, wherein the modified EPR3a or EPR3a-like polypeptide comprises a modified ectodomain that has been replaced with all or a portion of an ectodomain of the heterologous EPR3a or EPR3a-like polypeptide, optionally all or a part of the M1 domain, the M2 domain, the LysM3 domain, or all three; and wherein the modified EPR3 or EPR3-like polypeptide comprises a modified ectodomain that has been replaced with all or a portion of an ectodomain of the heterologous EPR3 or EPR3-like polypeptide, optionally all or a part of the M1 domain, the M2 domain, the LysM3 domain, or all three.

5. The genetically altered plant or part thereof of claim 3, wherein the expression of the heterologous EPR3a or EPR3a-like polypeptide, the modified EPR3a or EPR3a-like polypeptide, the heterologous EPR3 or EPR3-like polypeptide, the modified EPR3 or EPR3-like polypeptide, or a combination thereof allows the plant or part thereof to recognize an EPS, a beta-glucan, a cyclic beta-glucan, a LPS, or a surface carbohydrate produced by the microbe, and wherein the microbe is a commensal bacteria, optionally a nitrogen-fixing bacteria, or a mycorrhizal fungi.

6. The genetically altered plant of claim 5, wherein the heterologous EPR3a or EPR3a-like polypeptide, the modified EPR3a or EPR3a-like polypeptide, the heterologous EPR3 or EPR3-like polypeptide, or the modified EPR3 or EPR3-like polypeptide is localized to a plant cell plasma membrane, or both the EPR3 or EPR3-like polypeptide and the EPR3a or EPR3a-like polypeptide are localized to a plant cell plasma membrane, and wherein the plant cell is a root cell.

7. A method of producing the genetically altered plant of claim 3, comprising introducing a genetic alteration to the plant comprising the first nucleic acid sequence encoding the heterologous EPR3a or EPR3a-like polypeptide, and optionally further comprising introducing a genetic alteration to the plant comprising the second nucleic acid sequence encoding the heterologous EPR3 or EPR3-like polypeptide.

8. A method of producing the genetically altered plant of claim 3, comprising genetically editing a gene encoding an endogenous LysM receptor polypeptide in the plant to comprise the modified ectodomain,
wherein the endogenous LysM receptor polypeptide is an endogenous EPR3a or EPR3a-like polypeptide, and wherein the modified EPR3a or EPR3a-like polypeptide was generated by:
(a) providing a heterologous EPR3a or EPR3a-like polypeptide model comprising a structural model, a molecular model, a surface characteristics model, and/or an electrostatic potential model of a M1 domain, a M2 domain, a LysM3 domain, any combination thereof, or the ectodomain of the heterologous EPR3a or EPR3a-like polypeptide having selectivity for the beneficial commensal microbe and an unmodified EPR3a or EPR3a-like polypeptide;
(b) identifying one or more amino acid residues for modification in the unmodified EPRa3 polypeptide by comparing amino acid residues of a oligosaccharide binding feature in the unmodified EPR3a or EPR3a-like polypeptide with the corresponding amino acid residues in the heterologous EPR3a or EPR3a-like polypeptide model; and
(c) generating the unmodified EPR3a or EPR3a-like polypeptide wherein the one or more amino acid residues in the oligosaccharide binding feature of the unmodified EPR3a or EPR3a-like polypeptide have been substituted with corresponding amino acid residues from the heterologous EPR3a or EPR3a-like polypeptide; or
wherein the endogenous LysM receptor polypeptide is an endogenous EPR3 or EPR3-like polypeptide, and wherein the modified EPR3 or EPR3-like polypeptide was generated by:
(a) providing a heterologous EPR3 or EPR3-like polypeptide model comprising a structural model, a molecular model, a surface characteristics model, and/or an electrostatic potential model of a M1 domain, a M2 domain, a LysM3 domain, any combination thereof, or the ectodomain of the heterologous EPR3 or EPR3-like polypeptide having selectivity for the beneficial commensal microbe and an unmodified EPR3 or EPR3-like polypeptide;
(b) identifying one or more amino acid residues for modification in the unmodified EPR3 or EPR3-like polypeptide by comparing amino acid residues of a oligosaccharide binding feature in the unmodified EPR3 or EPR3-like polypeptide with the corresponding amino acid residues in the heterologous EPR3 or EPR3-like polypeptide model; and
(c) generating the unmodified EPR3 or EPR3-like polypeptide wherein the one or more amino acid residues in the oligosaccharide binding feature of the unmodified EPR3 or EPR3-like polypeptide have been substituted with corresponding amino acid residues from the heterologous EPR3 or EPR3-like polypeptide.

9. A genetically altered plant or part thereof comprising a first nucleic acid sequence encoding a heterologous EPR3 or EPR3-like polypeptide or a modified EPR3 or EPR3-like polypeptide, wherein the heterologous EPR3 or EPR3-like polypeptide or the modified EPR3 or EPR3-like polypeptide provides increased selectivity for a beneficial commensal microbe as compared to a wild-type plant under the same conditions.

10. The genetically altered plant or part thereof of claim 9, wherein the plant or part thereof further comprises a second nucleic acid sequence encoding a heterologous EPR3a or EPR3a-like polypeptide or a modified EPR3a or EPR3a-like polypeptide, wherein the heterologous EPR3a or EPR3a-like polypeptide or the modified EPR3a or EPR3a-like polypeptide provides increased selectivity for a beneficial commensal microbe as compared to a wild-type plant under the same conditions.

11. The genetically altered plant or part thereof of claim 10, wherein the modified EPR3 or EPR3-like polypeptide comprises a modified ectodomain that has been replaced with all or a portion of an ectodomain of the heterologous EPR3 or EPR3-like polypeptide, optionally all or a part of the M1 domain, the M2 domain, the LysM3 domain, or all three; and wherein the modified EPR3a or EPR3a-like polypeptide comprises a modified ectodomain that has been replaced with all or a portion of an ectodomain of the heterologous EPR3a or EPR3a-like polypeptide, optionally all or a part of the M1 domain, the M2 domain, the LysM3 domain, or all three.

12. The genetically altered plant or part thereof of claim 10, wherein the expression of the heterologous EPR3 or EPR3-like polypeptide, the modified EPR3 or EPR3-like polypeptide, the heterologous EPR3a or EPR3a-like polypeptide, the modified EPR3a or EPR3a-like polypeptide, or a combination thereof allows the plant or part thereof to recognize an exopolysaccharide (EPS), a beta-glucan, a cyclic beta-glucan, a LPS, or a surface carbohydrate produced by the microbe, and wherein the microbe is a commensal bacteria, optionally a nitrogen-fixing bacteria, or a mycorrhizal fungi.

13. The genetically altered plant or part thereof of claim 12, wherein the heterologous EPR3 or EPR3-like polypeptide, the modified EPR3 or EPR3-like polypeptide, the heterologous EPR3a or EPR3a-like polypeptide, or the modified EPR3a or EPR3a-like polypeptide is localized to a plant cell plasma membrane, or both the EPR3 or EPR3-like polypeptide and the EPR3a or EPR3a-like polypeptide are localized to a plant cell plasma membrane, and wherein the plant cell is a root cell.

14. A method of producing the genetically altered plant of claim 10, comprising introducing a genetic alteration to the plant comprising the first nucleic acid sequence encoding the heterologous EPR3 or EPR3-like polypeptide, and optionally further comprising introducing a genetic alteration to the plant comprising the second nucleic acid sequence encoding the heterologous EPR3a or EPR3a-like polypeptide.

15. A method of producing the genetically altered plant of claim 10, comprising genetically editing a gene encoding an endogenous LysM receptor polypeptide in the plant to comprise the modified ectodomain,
wherein the endogenous LysM receptor polypeptide is an endogenous EPR3 or EPR3-like polypeptide, and wherein the modified EPR3 or EPR3-like polypeptide was generated by:
(a) providing a heterologous EPR3 or EPR3-like polypeptide model comprising a structural model, a molecular model, a surface characteristics model, and/or an electrostatic potential model of a M1 domain, a M2 domain, a LysM3 domain, any combination thereof, or the ectodomain of the heterologous EPR3 or EPR3-like polypeptide having selectivity for the beneficial commensal microbe and an unmodified EPR3 or EPR3-like polypeptide;
(b) identifying one or more amino acid residues for modification in the unmodified EPR3 or EPR3-like polypeptide by comparing amino acid residues of a oligosaccharide binding feature in the unmodified EPR3 or EPR3-like polypeptide with the corresponding amino acid residues in the heterologous EPR3 or EPR3-like polypeptide model; and
(c) generating the unmodified EPR3 or EPR3-like polypeptide wherein the one or more amino acid residues in the oligosaccharide binding feature of the unmodified EPR3 or EPR3-like polypeptide have been substituted with corresponding amino acid residues from the heterologous EPR3 or EPR3-like polypeptide; or
wherein the endogenous LysM receptor polypeptide is an endogenous EPR3a or EPR3a-like polypeptide, and wherein the modified EPR3a or EPR3a-like polypeptide was generated by:
(a) providing a heterologous EPR3a or EPR3a-like polypeptide model comprising a structural model, a molecular model, a surface characteristics model, and/or an electrostatic potential model of a M1 domain, a M2 domain, a LysM3 domain, any combination thereof, or the ectodomain of the heterologous EPR3a or EPR3a-like polypeptide having selectivity for the beneficial commensal microbe and an unmodified EPR3a or EPR3a-like polypeptide;
(b) identifying one or more amino acid residues for modification in the unmodified EPR3a or EPR3a-like polypeptide by comparing amino acid residues of a oligosaccharide binding feature in the unmodified EPR3a or EPR3a-like polypeptide with the corresponding amino acid residues in the heterologous EPR3a or EPR3a-like polypeptide model; and
(c) generating the unmodified EPR3a or EPR3a-like polypeptide wherein the one or more amino acid residues in the oligosaccharide binding feature of the unmodified EPR3a or EPR3a-like polypeptide have been substituted with corresponding amino acid residues from the heterologous EPR3a or EPR3a-like polypeptide.

16. A method of identifying a beneficial commensal microbe capable of participating in a plant root microbiota comprising:
a) providing a first polypeptide comprising an EPR3a or EPR3a-like polypeptide, an ectodomain of an EPR3a or EPR3a-like polypeptide, a M1 domain of an EPR3a or EPR3a-like polypeptide, a M2 domain of an EPR3a or EPR3a-like polypeptide, or a LysM3 domain of an EPR3a or EPR3a-like polypeptide of the plant;
b) contacting the first polypeptide with a sample comprising a microbe or an EPS, a beta-glucan, a cyclic beta-glucan, a LPS, or a surface carbohydrate produced by the microbe;
c) detecting binding of the EPS, the beta-glucan, the cyclic beta-glucan, the LPS, or the surface carbohydrate produced by the microbe to the polypeptide, wherein binding of the EPS, the beta-glucan, the cyclic beta-glucan, the LPS, or the surface carbohydrate to the polypeptide indicates that the microbe is a beneficial commensal microbe capable of participating in the plant root microbiota; optionally, the detecting is by a functional assay optionally selected from (i) detecting enrichment of taxa in Burkholderiales and/or Rhizobiales in a plant rhizosphere or endosphere, wherein enrichment of taxa in Burkholderiales and/or Rhizobiales in the plant rhizosphere or endosphere indicates that the microbe is a beneficial commensal microbe capable of participating in a plant root microbiota; optionally, (ii) detecting nodulation in a plant root system, wherein nodulation indicates that the microbe is a beneficial commensal microbe capable of participating in a plant root microbiota; and/or (iii) detecting mycorrhization in a plant root system, wherein mycorrhization indicates that the microbe is a beneficial commensal microbe capable of participating in a plant root microbiota, or optionally the detecting is by a direct binding assay optionally selected from (1) a competition assay optionally with a known signaling saccharide, or (2) an affinity assay optionally wherein the detected affinity is compared to the affinity for the known signaling saccharide; and
optionally further comprising:
d) culturing the beneficial commensal microbe if binding is detected in step (c); and
e) applying the beneficial commensal microbe to the plant or a part thereof or applying the beneficial commensal microbe, optionally in admixture with a soil-compatible carrier, a fungal carrier, or a growth medium, optionally soil, where the plant is growing or is to be grown.

17. The method of claim 16, further comprising providing a second polypeptide comprising an EPR3 or EPR3-like polypeptide, an ectodomain of an EPR3 or EPR3-like polypeptide, a M1 domain of an EPR3 or EPR3-like polypeptide, a M2 domain of an EPR3 or EPR3-like polypeptide, or a LysM3 domain of an EPR3 or EPR3-like polypeptide of the plant in step (a), wherein the second polypeptide is in contact with the first polypeptide.

18. A method of identifying a beneficial commensal microbe capable of participating in a plant root microbiota comprising:
a) providing a first polypeptide comprising an EPR3 or EPR3-like polypeptide, an ectodomain of an EPR3 or EPR3-like polypeptide, a M1 domain of an EPR3 or EPR3-like polypeptide, a M2 domain of an EPR3 or EPR3-like polypeptide, or a LysM3 domain of an EPR3 or EPR3-like polypeptide of the plant;
b) contacting the first polypeptide with a sample comprising a microbe or an EPS, a beta-glucan, a cyclic beta-glucan, a LPS, or a surface carbohydrate produced by the microbe;
c) detecting binding of the EPS, the beta-glucan, the cyclic beta-glucan, the LPS, or the surface carbohydrate produced by the microbe to the polypeptide, wherein binding of the EPS, the beta-glucan, the cyclic beta-glucan, the LPS, or the surface carbohydrate to the polypeptide indicates that the microbe is a beneficial commensal microbe capable of participating in a plant root microbiota; optionally, the detecting is by a functional assay optionally selected from (i) detecting enrichment of taxa in Burkholderiales and/or Rhizobiales in a plant rhizosphere or endosphere, wherein enrichment of taxa in Burkholderiales and/or Rhizobiales in the plant rhizosphere or endosphere indicates that the microbe is a beneficial commensal microbe capable of participating in a plant root microbiota; optionally, (ii) detecting nodulation in a plant root system, wherein nodulation indicates that the microbe is a beneficial commensal microbe capable of participating in a plant root microbiota; and/or (iii) detecting mycorrhization in a plant root system, wherein mycorrhization indicates that the microbe is a beneficial commensal microbe capable of participating in a plant root microbiota, or optionally the detecting is by a direct binding assay optionally selected from (1) a competition assay optionally with a known signaling saccharide, or (2) an affinity assay optionally wherein the detected affinity is compared to the affinity for the known signaling saccharide; and
optionally further comprising:
d) culturing the beneficial commensal microbe if binding is detected in step (c); and
e) applying the beneficial commensal microbe to the plant or a part thereof or applying the beneficial commensal microbe, optionally in admixture with a soil-compatible carrier, a fungal carrier, or a growth medium, optionally soil, where the plant is growing or is to be grown.

19. The method of claim 18, further comprising providing a second polypeptide comprising an EPR3a or EPR3a-like polypeptide, an ectodomain of an EPR3a or EPR3a-like polypeptide, a M1 domain of an EPR3a or EPR3a-like polypeptide, a M2 domain of an EPR3a or EPR3a-like polypeptide, or a LysM3 domain of an EPR3a or EPR3a-like polypeptide of the plant in step (a), wherein the second polypeptide is in contact with the first polypeptide.

The application's sequence listing, which the Patent Office published only in electronic form, follows.

SEQUENCE LISTING (191 sequences)

SEQ ID NO: 1 - protein, 620 aa, Lotus japonicus
MFYDFTTMASLTHPLCVLLTLMAAASFASVFSLEVSSKTTYMEPFNCSTKIRTCNSLLYHISIGLKVEEIARFYSVNLSRIKPITRGTKQDYLVSVPCTCRNTNGLNGYFYHTSYKVKVNDSFVDIQNLFYSGQAWPVNEDLVVPNETMTIHIPCGCSESGSQIVVTYTVQRNDTPLSIALLLNATVEGMVSVNSVMAPNPTFIDVGWVLYVPKELNPISHGKENKHKLEKIIGILAGVILLSIITLIILIVRRNRSYETCKDDPRAISKRSIGKRTSSLMNRDFHKEYMEDATSFDSERPVIYTLEEIEQATNDFDETRRIGVGGYGTVYFGVLGEKEVAIKKMKSNKSKEFYAELKALCKIHHINIVELLGYASGDDHLYLVYEYVPNGSLSEHLHDPLLKGHQPLSWCARIQVALDSAKGIEYIHDYTKAQYVHRDIKTSNILLDEKLRAKVADFGLAKLVERTNDEEFIATRLVGTPGYLPPESLKELQVTVKTDVFAFGVVMLELITGKRALFRDNQEANNMRSLVAVVNQIFQEDNPETALEVTVDGNLQRSYPMEDVYNMAELSHWCLRENPVDRPEMSEIVVKLSKIIMSSIEWEASLGGDSQVFSGVFDGR

SEQ ID NO: 2 - protein, 613 aa, Cicer arietinum
MSYLTQILSLFLILLASSLLSVFSIEVSIKNTYIEPFKCSTKIRTCNASLYHINYDQKIEQIAHFYSIGVSQIKPIIRSNKQDYLVKVPCSCKNTNDLSGYFYETNYMVSPNESFVDVNTLVYSGQAWQVNEDLVPNENVTINIPCGCSEFESQIVVTYTVQHSDTPNSIALMLNATVDGMVRMNQVLGPNPTFIDIGWVLYVPKELKGSPLSHGKGKKHKWEAIISILVSVTLLSVITMIVLILRRHKPYGTTKKDPKTVSKRSFGNRTISIRNHDFHKEYMEDATQFDPERPVIYAFEEIEDATNNFDETRRIGVGGYGTVYFGMLDDKEVAVKKMRSNKSKEFYAELKALCKIHHINIVELLGYASGDDHLYLVYEYVPNGSLSEHLHDPLLKGHQPLSWCARTQIALDAAKGVEYIHDYTKARYVHRDIKTSNILLDAKLRAKVADFGLAKLVERTNDEEFLATRLVGTPGYLPPESVKELQVTIKTDVFAFGVVLSELITGKRALFRDNQEANNMKSLIAVINKIFQDDDPVSALEATVDGNLLRSYPLEDVYKVAELSHWCLSENPVDRPEMKEMVVALSKIVMSSIEWEASLGGDSQVFSGVFDGR

SEQ ID NO: 3 - protein, 622 aa, Medicago truncatula
MASLIQLLSIFLPLLASSLPTIFSIEVSMKKAYMEPYKCSTKMRTCNASLYHINYNHNIEQIANFYSIDPSQIKPIIRSTKQDYLVKVPCSCKNIKDLSGYFYETTYKVSPNETSVDIMNLIYSGQAWQVNEDLVANENVTIHIPCGCSEFESQIVVTYTVQQSDTPTSISLLLNATIDGMVRINQILGPNPTFIDIGWVLYVPKELKGSPLYHGKEKKHKWVIIIGILVSVTLLSVITLIIFILRRNKAYETSKYDPKTVSKRSFGNRTISLRNHEFHKEYMEGLFMVNIGTDATQFDSERPVIYDFEEIEHATNNFDETRRIGVGGYGTVYFGMLEEKEVAVKKMKSNKSKEFYAELKALCKIHHINIVELLGYASGDDHLYLVYEYVPNGSLSEHLHDPLLKGHQPLSWCARTQIALDSAKGIEYIHDYTKARYVHRDIKTSNILLDEKLRAKVADFGLAKLVERTNDEEFLATRLVGTPGYLPPESVKELQVTIKTDVFAFGVVISELITGKRALFRDNKEANNMKSLIAVVNKIFQDEDPVAALEAVVDGNLLRNYPIEGVYKMAELSHWCLSEEPVDRPEMKEIVVAVSKIVMSSIEWEASLGGDSQVFSGVFDGR

SEQ ID NO: 4 - protein, 639 aa, Glycine max
MVSGWAAHRPNKYNFHDHTTMASSLVALLSLLLTLLATSCLSATVFSLQVSIKTTYLEPFKCSPKITTCNASLYHISYGNNIDDIATFYSVSTSQIKPIMRTTEQDYLITVPCSCNDTNGLGGYFYDTTYKVKSNDTFVNINNFVYSGQAWPINGELDQNEELTIHLPCGCSEKSDSQIVVTYTVQRNDTPVSIAALLNATLDDMVSMNEVLAQNPSFIDVTWVLYVPRELNGLPLSKGKDKKQKLEIIIGILAGVTLLSIITLIILSVVLRRSRANKTAKNDPSVVSKRSITNRTISIKNRDFHTEYIEDATTFESERPVIYALEEIEDATNNFDETRRIGVGGYGTVYFGMLEEKEVAVKKMRSNKSKEFYAELKALCRIHHINIVELLGYASGDDHLYLVYEFVPNGSLCEHLHDPLLKGHQPLSWCARIQIALDAAKGLEYIHDYTKARYVHRDIKTSNILLDEKLRAKVADFGLAKLVERTNDEELIATRLVGTPGYLPPESVKELQVTIKTDVFAFGVVLAELITGKRALFRDNQEASNMKSLTSVVGQIFKDDDPETVLADAIDGNLQRSYPMEDVYKMAELAHWCLCEDPNVRPEMREIVVALSQIVMSSTEWEASLGGDREVFSGVLDGR

SEQ ID NO: 5 - protein, 619 aa, Phaseolus vulgaris
MITQTMASLTSLLSLLIPLLATSYVGVAVFSLQASLQTTYLEPLRCSSKISTCNASLYHISYSHNADEIANFYSVHPSQIKPITRGTKQDYLITVPCSCHNTNGLAGYFYDTTYKVKPNDSSVEINNIVYSGQAWSINREVDPNEDLAIHLPCGCSEKNDSQIVVTYTVQRNDTPTSIATMLNATLDGMVSMNEVLAQNPSYIDITWVLYVPSQLNGLPSKGKDKKHHIIIGILAAVAFFSTITLIILVVVLRRSRANVTAKNDPNIVSKRSVGFRTISIKNRDFHAEHGEDATPFESERPVIYALEEIEEATNNFDETRRIGVGGYGSVYFGMLEKEVAVKKMRSNKSKEFYAELKALCKIHHINIVELLGYASGDDHLYLVYEYVPNGSLSEHLHDPLLKGHQPLSWCARIQIALDAAKGLEYIHDYTKARYVHRDIKTSNILLDEKLRAKVADFGLAKLVERTNDEEFIATRLVGTPGYLPPESVKELQVTIKTDVFAFGVVLSELITGKRALYRDSQQANNMKSLVTVVSQIFGNKYPQTVLPDVIDGNLQHSYPMEDVYRMAELAHWCLCEDPNDRPEMREMVVALSQIVMSSTEWEASLGGDSQVFSGVLDGR

SEQ ID NO: 6 - protein, 562 aa, Populus trichocarpa
MYPFSCSDQVQNCDSYLYHISEGLSIEQIASFYSVKSSNVEPITHGLKQDYLVSVPCTCKDVNGTQGYFYDTFYSVQSGDIFTNVTWVLYSGQAWEVPGVERLFIAGDMISVHLVCGCLEVEAKEIVTYTVQENDTLTGIAELLSAELTGIENLNERFTRNPNLIDVGWVLFVPREKNGIQAPKQGKQHNLAIILGTLSAVTLFSVCSLLLFLHRRNRNHKNRKEDPEVVNKAQNATFESERPIVYSLKEIDEATSQFDESRKIGAGGYGIVYIGTLKEREVAIKKMKSSRSKEFYSELKVLCKIHHINVVELLGYATGDNHLYLVYEYIQNGSLNDHLHDPLLKGHSPLSWLARAQIALDAARGIEYIHDHTKARYIHRDIKTSNILLDKGLGAKVADFGLARLVERSNEEDAVATRLVGTPGYIAPESVRELQMTSKTDVFSFGVVLAELITGQRALARDNGQPNKMKVLVAVMTAIFRDQDPETALEANIDENMKGSYPMDEVYKMAELSTHCMNEDPTNRPEMREIVQKLCKILMSSIEWEASLGGSSQVFTRLFDGR

SEQ ID NO: 7 - protein, 624 aa, Malus domestica
MASPHLLLPCMLLSLFLSLFSAVFAADASIRSALVNPLSCSAKIMTCNASLYHINIDLKVEEIATLYTVNPSEIRPIKHNKKQDYLISVPCSCKNISGTVGYFYDTTYKVKQFDTFYNVSTKIYSGQPLYIEEEIPQFKTDADFPIHLPCGCVQSQSQIVVTYTVQEHDTLSDIGTLLSAKIENIEKMNKNMTENPSYIVVGWVLFVPMEKNGLRTSKPGFRHKWSILVAILLAVTLLSISTLIFILYRRRKPEQNVEVPDKPVSTSLKSSKSSAPHRSLSLHNQLLHKENMGDVAIFESDGLVIFSLEEIEEATGYFDETKKIGEGGYGSVFLGVIRGKEVAIKKMKSNSTKEFFAELKVLCKIHHINVVELLGYASGDDHLYLVYEYVQNGSLSEHLHDPLLKGHQPLSWTARTQIAVDAAKGIEYIHDHTKARYVHRDIKTSNILLDEGFRAKVADFGLAKLVGRTNEEDVFATRLVGTPGYLPPESVKELQVTHKTDVFAFGVVLAELITGQRALFRDNREPGKMKSLITVIKKVFQDDHPEAALEAATDGNLRSNYPMEDMFKMAEIAEWCMSEEAVERPEMREIVVMLSQIATSSIEWEATLGGNSQVFSGVFQFTGR

SEQ ID NO: 8 - protein, 605 aa, Vitis vinifera
MYPFPCSESIKICNSSLYHINNGLQAEQIAFFYSVNRSEITYVKNQDYLVTVPCSCQKINDIAGYFYHTTYPVKKDDTFVNVSGQIYSGQAWSFGGEESKFIEGHEVDIYLPCGCVERKSQIVVTYTVQLHDTLSDIATLLSAKISGIESMNSILIQNSEYIDVGWVLFIPREKNGLSKDKEGESNILEISLKSLYIFLKQLTCFFHSLSGTKHKWAIIISILAAVTVLSISTLIIIVLRRNRSQKNSEEDPKVSKSLSSNRTFSFRNQHLQENIEDVPGFESERPVIFSLEEIEDATNNFDETRKIGEGGYGSVYFGVLGEQEVAIKKMRSNKSKEFFAELKVLCKIHHINVVELLGYASGDDHLYLVYEYVQNGSLNDHLHDPLLKGNQPLSWTARTQIALDAARGIEYIHDHTKARYVHRDIKTSNILLDETLRAKVADFGLAKLVGRTNEEDFIATRLVGTPGYLPPESVKELQVTSKTDVFAYGVVLAELITGQRALVRDNREPNKMRSLITVVNEIFHNEDPEIALEDAIDRTLRGSYPLEDAYKMAEIAERCLSEEAVDRPKMREIVVILTQIMTSALEWEASLGGNSQVFSGLFSGR

SEQ ID NO: 9 - protein, 610 aa, Theobroma cacao
MSPSNLHCFLSVMTIIFAGFLFDFPIESTLVYPLGCASNIPSCNSYLYHISKGLSIEEMANFYSVNTSQIQSITHDAKLDYLVSVPCTCKDVNGTLGYFYDTLYKVKPGDTYAGVSGEFYSGQAWMIAAEEQLLVAGDMITIHLVCGCLGVENQEAATYTVQDRDTLLQIAELLSANLSEIENLNRNLIRNPNFIDIGWVLFVPIGKRKIQAPKAGKRHNLPIIIGTILVVTLLSMSMLVRFLIRRNRNHRKNRDLEAVNKSPSAKKSSSQNQLLQDKYMEGVASIESERPVTYSLEEINEATNNFDESRKIGQGGYGTVYIGLLKEQEVAIKKMKFSQSKEFFAELKVLCKIHHINVVELLGYARGDNHLYLIYEYIQNGSLNDHLHDPVLKGHLPLSWTARANVALDAARGIEYIHDHTKTRYVHRDIKTSNILLDQRLEAKVADFGLARLVERSNEEDVVATCLVGTPGYIAPECARELQMTSKTDVFAFGVVLAELVTGQRALIRNNQEPNKMKSLVSVIYTIFQVTDKEGALEANIDANLRGSYPMEEVYKMAELSRQCLNEDAMNQPAMREVVQKLSQILTSSIEWEAALRGNNCVFSRMLKGR

SEQ ID NO: 10 - protein, 623 aa, Ricinus communis
MSSDNLLPSFLIPLLLTLLVRVFASNNSMHPFTCSEESNHVRMCNASLYHINKGLQIDQIAYFYNVSITQITPILNGDRKDYIIMVPCSCENVNGTKAYFYDAIYQVKENDTFLNVSDQMYSGQAWEVGNESSTFITGYQVPMHLLCGCVESESQIVVTYTIEQQDTLSDIASRLSSTTSGILDMNSFVIKDPNFLRPDWVLFVPKEINGIPTPNTGGSEFSPKIHESGKRQKWAIIISILSVVTLLLMITVIIIVLRMKISQPNNKEDPKALSKSMSTIRGHSLQILNMDIIEDGTAFESEKPVIYSPEEIEEATNNFDESRKIGAGGYGSVYFGELAGQEVAIKKMKSNKSKEFFAELKVLCRIHHINVVELLGYASGDDHLYLVYEYIQNGSLSDHLHDPLLKGYQALSWTARTQIAVDAAKGIEYIHDHTKTRYVHRDIKSSNILLDEGLRAKVADFGLAKLVERTNDEDLIATRLVGTPGYLPPESVKELQVTTKTDVFAFGVVLAELITGQRALVRDNWEPTKTRSLITVVYKIFEDDDPETALENSVDRNLQGSFPVEDVYKMAEIAEWCLNEDPINRPEMRDIVPNLSKIMTSSVEWEASLGGNSTVFSGIYNGR

SEQ ID NO: 11 - protein, 600 aa, Fragaria vesca subsp. vesca
MDMACLNLLCIIFTTFYSTVLATNASIRIYPFTCSASHHIRSCNSELYHISTGYKIEEIASFYSVNVSKVKPVARSQTQKDYLVSVPCSCKDIDGTQMYVYDTNHQVQPGDTFESVSGEFYSRQALKVEGNMSTIHLVCGCVKKKSQVVVTYTVQEHDTLSGIGYLLGAYQTEIEKYNINFTADPSFVDVGWVLYVPKEKNGIRANKKGRRLKVAILVGVLSSVCFVSVAAFIVFLIMRNRSCRNLEDDVHLVNSRVKKRSSLKEQFFKKEMEETFDNERPVIYTMEQIKEATNNFDDTRKIGEGGYGCVYFAILGEAEVAIKNMRSTRTKEFFAELKVLCRIHHNNVVELLGYASGSEHLCLVYEFVHNGSLNDHLHDPLLKGRQPLSWTARAQIALDTARGIEYIHDHTKTRYVHRDIKTSNILLDEGLRAKVADFGLARLVERSNEEDIVATRVVGTPGYIPPESVRELQMTSKSDVYAFGVVLGELITGQRAIIRDNREPKRMRSLVSILYEVFKDDDPEIALKDKIDGNLNGSYPMEEVYKMGEIARWCSSEDPVNRPEMRDIVQSLSHILMSSVEWEASLGGKSEVFSGLFSGR

SEQ ID NO: 12 - protein, 629 aa, Zea mays
MLYPHSAQQTRTAWTTRSRSRMDTACHHYTSASFTDQPSSIASAAEWQPLTCNAAVSNNPSCGSFLYVTPRGRTLSEVVSVFNGNASLIQPIKRLSGSEDLLVGVACKCEAINDTMTAFFHDTQYEVEPGDTPDNVKSNNFSGLAMNVGDGRTLIAGTTIAVHLPCGCSSTAPEGVLSYSVQEEDTLSTIASLFSSRQQDILNLNPILRNADFIRTGWILFIPMGVAGSSKKGIGSMRIIIAASVSAAVLLFCVLAVILRRRRRSSQHNVEAPEIKMERAPSNTSIAALESRFFPTMRTNDTDPFQTERPVIFSLKQVGDATADFSEKRKIGEGGYGSVYLGFIGAHEIAIKKMKASKSKEFFAELKALCKVHHINVVELIGYAAGDDHLYLVYEYVQNGSLTDHLHDPLLKGHQPLSWTARTQIALDAARGIEYIHDHTKACYVHRDIKTSNILLDNGLRAKVADFGLVKLVERSDEEEFVATRLVGTPGYLPPESVLELHMTTKSDVYAFGVVLAELITGLRALIRDNKEVNKTKSITSIMREVFKSEDLERSLETIIDPNLKDSYPIEEVCKMANVSMWCLSEDPLNRPETRDIMSTLGQIHLASIEWEASLCGDGEVFSGVSYGR

SEQ ID NO: 13 - protein, 618 aa, Oryza sativa
  Japonica Group
MSKHGFLFFLLFFVQHLHTIISLLDSPGGSLASLPEWQPMPCKSVSVNPLCSSYLYVTPEGRNLSKVASDFSGNASLFQRITRLSGSEDLLVNVPCVCEAINATMTGLFHDTNYRVKDGDMGDIINSKTFSGLALNVGDGQILHKEEKLIIHLPCGCSSTAPEGVLSYAVQDGDTLGNIASLFRSSWKDILDLNPRVANPDFIKPGWILFIPMGVAGPSNKKVRGLPIIIAASISVAMLLLCVLTIILCLKRRSTLPSVEAPAHKMEKIPSNTSIAALESRFYPSMRINEIDPFQTERPVIFSLRAIEDATSNFDEKRKIGEGGYGSVYLGFIGTHEIAVKKMKASKSKEFFAELKVLCKIHHINVVELIGYAAGDDHLYLVYEYVQNGSLSEHLHDPLLKGHQPLSWTARTQIAMDSARGIEYIHDHTKTCYVHRDIKTSNILLDNGLRAKVADFGLVKLVQRSDEDECLATRLVGTPGYLPPESVLELHMTTKSDVYAFGVVLAELITGLRALVRDNKEANKTKSLISIMRKAFKPEDLESSLETIVDPYLKDNYPIEEVCKLANISMWCLSEDPLHRPEMREVMPILAQIHMASIEWEASLGGDGEVFSGVSNGR

SEQ ID NO: 14 - protein, 615 aa, Triticum aestivum
MARHSFFFFFFFLALFLQHLHISVGLPGRSLAAATEQWQPMQCDAASLNPSSCSSYLYVTPQGRSLSEIASLFNGSTSLTQPIKRRSGSEDLLLRVPCVCGAINDTMSGLFHDTEYKVSPDDTADSINSNFSGLAWNVIPTANKTITVHLLCGCSSMASEGVVSYTVQPKDTLSNIATLFRSGSREILSLNAGVTDPDFLKEGWILFIPMGVASSSKRKFGGLPIIITVSISAAIMLLFALTIVLRLRRRSLVPNVEVPKKEMERVPSNTSIAILESRYFPTKRIDDIDPFQTERPVIFSLKAVGEATANFDEKRKIGEGGYGMVYLGFIGTHEIAVKMMKDSKSKEFFAELKVLCKVHHINVVELIGYASGEDHLYLVYEYVQNGSLSEHLHDPLLKGHQPLSWTARTQIATDAARGIEYIHDHTKACYVHRDIKTSNILLDDGLRAKVADFGLVKLVERSDEEDCLATRLVGTPGYLPPESVRELHMTTKSDVYAFGVVLAELITGLRALVRDNKEANKTKSLISTMRKAFKSEDVESSLEKIIDPSLKDNYPIEEVCKLVNISMWCLSEDPLDRPEMREIMPMLSRIHLTSIEWEASLGGDAEVFSGVFNGR

SEQ ID NO: 15 - protein, 612 aa, Hordeum vulgare
MARHSLFFFFLALSLQHLHISVGLPGRSLATATEQWQPMQCDAASLNASCSSYLYVTPQGRSLSEIASLFNGSASRTQPIKRLSGSEDLLVPVPCMCDAINDNMSGLFHDTAYKVNLNDTADNINSIFSGLAWNITATANTTITVHLLCGCSSTAPEGVISYMVQARDTLSNIATLFRSGSSEILSLNAGVTDPDFLQPGWILFIPMGVASSSKRKFGGLPIIIAVSISAAIMLLCTLTIVLRLRRRSLVPNAEVPKKEMERVPSNTSIAILESRYFPSKRIDDIDPFQTERPVIFSLKAVGEATANFDEKRKIGEGGYGMVYLGFIGTHEIAVKMMKDSKSKEFFAELKVLCKVHHINVVELIGYASGEDHLYLVYEYVQNGSLSEHLHDPLLKGHQPLSWTARTQIATDAARGIEYIHDHTKACYVHRDIKTSNILLDDGLRAKVADFGLVKLVERSDEEDCLATRLVGTPGYLPPESVRELHMTTKSDVYAFGVVLAELITGLRALVRDNKEANKTKSLISTMRKAFKSEDVESSLENIIDPSLKDNYPIEEVCKLANISMWCLSEDPLDRPEMREIMPMLSRIHLTSIEWEASLGGDHEVFSGVFNGR

SEQ ID NO: 16 - protein, 59 aa, Lotus japonicus
MEPFNCSTKIRTCNSLLYHISIGLKVEEIARFYSVNLSRIKPITRGTKQDYLVSVPCTC

SEQ ID NO: 17 - protein, 59 aa, Cicer arietinum
IEPFKCSTKIRTCNASLYHINYDQKIEQIAHFYSIGVSQIKPIIRSNKQDYLVKVPCSC

SEQ ID NO: 18 - protein, 59 aa, Medicago truncatula
MEPYKCSTKMRTCNASLYHINYNHNIEQIANFYSIDPSQIKPIIRSTKQDYLVKVPCSC

SEQ ID NO: 19 - protein, 59 aa, Glycine max
LEPFKCSPKITTCNASLYHISYGNNIDDIATFYSVSTSQIKPIMRTTEQDYLITVPCSC

SEQ ID NO: 20 - protein, 59 aa, Phaseolus vulgaris
LEPLRCSSKISTCNASLYHISYSHNADEIANFYSVHPSQIKPITRGTKQDYLITVPCSC

SEQ ID NO: 21 - protein, 59 aa, Populus trichocarpa
MYPFSCSDQVQNCDSYLYHISEGLSIEQIASFYSVKSSNVEPITHGLKQDYLVSVPCTC

SEQ ID NO: 22 - protein, 59 aa, Malus domestica
VNPLSCSAKIMTCNASLYHINIDLKVEEIATLYTVNPSEIRPIKHNKKQDYLISVPCSC

SEQ ID NO: 23 - protein, 56 aa, Vitis vinifera
MYPFPCSESIKICNSSLYHINNGLQAEQIAFFYSVNRSEITYVKNQDYLVTVPCSC

SEQ ID NO: 24 - protein, 59 aa, Theobroma cacao
VYPLGCASNIPSCNSYLYHISKGLSIEEMANFYSVNTSQIQSITHDAKLDYLVSVPCTC

SEQ ID NO: 25 - protein, 62 aa, Ricinus communis
MHPFTCSEESNHVRMCNASLYHINKGLQIDQIAYFYNVSITQITPILNGDRKDYIIMVPCSC

SEQ ID NO: 26 - protein, 62 aa, Fragaria vesca subsp. vesca
IYPFTCSASHHIRSCNSELYHISTGYKIEEIASFYSVNVSKVKPVARSQTQKDYLVSVPCSC

SEQ ID NO: 27 - protein, 63 aa, Zea mays
WQPLTCNAAVSNNPSCGSFLYVTPRGRTLSEVVSVFNGNASLIQPIKRLSGSEDLLVGVACKC

SEQ ID NO: 28 - protein, 62 aa, Oryza sativa
  Japonica Group
WQPMPCKSVSVNPLCSSYLYVTPEGRNLSKVASDFSGNASLFQRITRLSGSEDLLVNVPCVC

SEQ ID NO: 29 - protein, 63 aa, Triticum aestivum
WQPMQCDAASLNPSSCSSYLYVTPQGRSLSEIASLFNGSTSLTQPIKRRSGSEDLLLRVPCVC

SEQ ID NO: 30 - protein, 62 aa, Hordeum vulgare
WQPMQCDAASLNASCSSYLYVTPQGRSLSEIASLFNGSASRTQPIKRLSGSEDLLVPVPCMC

SEQ ID NO: 31 - protein, 57 aa, Lotus japonicus
RNTNGLNGYFYHTSYKVKVNDSFVDIQNLFYSGQAWPVNEDLVVPNETMTIHIPCGC

SEQ ID NO: 32 - protein, 56 aa, Cicer arietinum
KNTNDLSGYFYETNYMVSPNESFVDVNTLVYSGQAWQVNEDLVPNENVTINIPCGC

SEQ ID NO: 33 - protein, 56 aa, Medicago truncatula
KNIKDLSGYFYETTYKVSPNETSVDIMNLIYSGQAWQVNEDLVANENVTIHIPCGC

SEQ ID NO: 34 - protein, 56 aa, Glycine max
NDTNGLGGYFYDTTYKVKSNDTFVNINNFVYSGQAWPINGELDQNEELTIHLPCGC

SEQ ID NO: 35 - protein, 56 aa, Phaseolus vulgaris
HNTNGLAGYFYDTTYKVKPNDSSVEINNIVYSGQAWSINREVDPNEDLAIHLPCGC

SEQ ID NO: 36 - protein, 59 aa, Populus trichocarpa
KDVNGTQGYFYDTFYSVQSGDIFTNVTWVLYSGQAWEVPGVERLFIAGDMISVHLVCGC

SEQ ID NO: 37 - protein, 59 aa, Malus domestica
KNISGTVGYFYDTTYKVKQFDTFYNVSTKIYSGQPLYIEEEIPQFKTDADFPIHLPCGC

SEQ ID NO: 38 - protein, 59 aa, Vitis vinifera
QKINDIAGYFYHTTYPVKKDDTFVNVSGQIYSGQAWSFGGEESKFIEGHEVDIYLPCGC

SEQ ID NO: 39 - protein, 59 aa, Theobroma cacao
KDVNGTLGYFYDTLYKVKPGDTYAGVSGEFYSGQAWMIAAEEQLLVAGDMITIHLVCGC

SEQ ID NO: 40 - protein, 59 aa, Ricinus communis
ENVNGTKAYFYDAIYQVKENDTFLNVSDQMYSGQAWEVGNESSTFITGYQVPMHLLCGC

SEQ ID NO: 41 - protein, 51 aa, Fragaria vesca subsp. vesca
KDIDGTQMYVYDTNHQVQPGDTFESVSGEFYSRQALKVEGNMSTIHLVCGC

SEQ ID NO: 42 - protein, 59 aa, Zea mays
EAINDTMTAFFHDTQYEVEPGDTPDNVKSNNFSGLAMNVGDGRTLIAGTTIAVHLPCGC

SEQ ID NO: 43 - protein, 59 aa, Oryza sativa
  Japonica Group
EAINATMTGLFHDTNYRVKDGDMGDIINSKTFSGLALNVGDGQILHKEEKLIIHLPCGC

SEQ ID NO: 44 - protein, 54 aa, Triticum aestivum
GAINDTMSGLFHDTEYKVSPDDTADSINSNFSGLAWNVIPTANKTITVHLLCGC

SEQ ID NO: 45 - protein, 54 aa, Hordeum vulgare
DAINDNMSGLFHDTAYKVNLNDTADNINSIFSGLAWNITATANTTITVHLLCGC

SEQ ID NO: 46 - protein, 59 aa, Lotus japonicus
SESGSQIVVTYTVQRNDTPLSIALLLNATVEGMVSVNSVMAPNPTFIDVGWVLYVPKEL

SEQ ID NO: 47 - protein, 59 aa, Cicer arietinum
SEFESQIVVTYTVQHSDTPNSIALMLNATVDGMVRMNQVLGPNPTFIDIGWVLYVPKEL

SEQ ID NO: 48 - protein, 59 aa, Medicago truncatula
SEFESQIVVTYTVQQSDTPTSISLLLNATIDGMVRINQILGPNPTFIDIGWVLYVPKEL

SEQ ID NO: 49 - protein, 60 aa, Glycine max
SEKSDSQIVVTYTVQRNDTPVSIAALLNATLDDMVSMNEVLAQNPSFIDVTWVLYVPREL

SEQ ID NO: 50 - protein, 60 aa, Phaseolus vulgaris
SEKNDSQIVVTYTVQRNDTPTSIATMLNATLDGMVSMNEVLAQNPSYIDITWVLYVPSQL

SEQ ID NO: 51 - protein, 59 aa, Populus trichocarpa
LEVEAKEIVTYTVQENDTLTGIAELLSAELTGIENLNERFTRNPNLIDVGWVLFVPREK

SEQ ID NO: 52 - protein, 59 aa, Malus domestica
VQSQSQIVVTYTVQEHDTLSDIGTLLSAKIENIEKMNKNMTENPSYIVVGWVLFVPMEK

SEQ ID NO: 53 - protein, 59 aa, Vitis vinifera
VERKSQIVVTYTVQLHDTLSDIATLLSAKISGIESMNSILIQNSEYIDVGWVLFIPREK

SEQ ID NO: 54 - protein, 59 aa, Theobroma cacao
LGVENQEAATYTVQDRDTLLQIAELLSANLSEIENLNRNLIRNPNFIDIGWVLFVPIGK

SEQ ID NO: 55 - protein, 59 aa, Ricinus communis
VESESQIVVTYTIEQQDTLSDIASRLSSTTSGILDMNSFVIKDPNFLRPDWVLFVPKEI

SEQ ID NO: 56 - protein, 59 aa, Fragaria vesca subsp. vesca
VKKKSQVVVTYTVQEHDTLSGIGYLLGAYQTEIEKYNINFTADPSFVDVGWVLYVPKEK

SEQ ID NO: 57 - protein, 56 aa, Zea mays
SSTAPEGVLSYSVQEEDTLSTIASLFSSRQQDILNLNPILRNADFIRTGWILFIPM

SEQ ID NO: 58 - protein, 56 aa, Oryza sativa
  Japonica Group
SSTAPEGVLSYAVQDGDTLGNIASLFRSSWKDILDLNPRVANPDFIKPGWILFIPM

SEQ ID NO: 59 - protein, 56 aa, Triticum aestivum
SSMASEGVVSYTVQPKDTLSNIATLFRSGSREILSLNAGVTDPDFLKEGWILFIPM

SEQ ID NO: 60 - protein, 56 aa, Hordeum vulgare
SSTAPEGVISYMVQARDTLSNIATLFRSGSSEILSLNAGVTDPDFLQPGWILFIPM

SEQ ID NO: 61 - protein, 620 aa, Lotus japonicus
MFYDFTTMASLTHPLCVLLTLMAAASFASVFSLEVSSKTTYMEPFNCSTKIRTCNSLLYHISIGLKVEEIARFYSVNLSRIKPITRGTKQDYLVSVPCTCRNTNGLNGYFYHTSYKVKVNDSFVDIQNLFYSGQAWPVNEDLVVPNETMTIHIPCGCSESGSQIVVTYTVQRNDTPLSIALLLNATVEGMVSVNSVMAPNPTFIDVGWVLYVPKELNPISHGKENKHKLEKIIGILAGVILLSIITLIILIVRRNRSYETCKDDPRAISKRSIGKRTSSLMNRDFHKEYMEDATSFDSERPVIYTLEEIEQATNDFDETRRIGVGGYGTVYFGVLGEKEVAIKKMKSNKSKEFYAELKALCKIHHINIVELLGYASGDDHLYLVYEYVPNGSLSEHLHDPLLKGHQPLSWCARIQIALDSAKGIEYIHDYTKAQYVHRDIKTSNILLDEKLRAKVADFGLAKLVERTNDEEFIATRLVGTPGYLPPESLKELQVTVKTDVFAFGVVMLELITGKRALFRDNQEANNMRSLVAVVNQIFQEDNPETALEVTVDGNLQRSYPMEDVYNMAELSHWCLRENPVDRPEMSEIVVKLSKIIMSSIEWEASLGGDSQVFSGVFDGR

SEQ ID NO: 62 - protein, 615 aa, Lotus japonicus
MASFTQLFSFLFPLLATSLHRISAFEVSIKTSVIAPLNCSANIKTCNAFLYHISHNHTVEEIATFYSVSSSQINPIMYRTRQDYLITVPCSCKITNELSGYFYDTTYTVRPNDIFSNISDLIYSGQAWPVTGTLFPEEHLSIHIPCGCSENESQIVVTYTVQQNDTQTTIANLLNSTRAGILSMNIILDKNTGFIDLGWVLFVPKELKGLRVPPSNKKEKKHKNWIIIIGILAGVVLLSIIAIIIVILRRKGANQISKEDSQVVSKRSIRSRKFSSMNSNLHTRYISDAMSIESERPVVYNLDDIEEATNYFDETQKIGRGGFGSVYFGMLGKTEVAVKKMRSNKSREFYAELKVLCRINHINIVELLGYASGEDHLYLVYEYVSNGSLSDHLHDPLLKGYQPLSWSARVQIALDAAKGLEYIHDHTKARYVHRDIKTSNILLDEKLRAKVGDFGLAKLVDRTNDESFIATRLVGTPGYLPPESVKELQVTPKTDVFAFGVVLSELLTGKRALFRESKEATKMNSLITVVNKVFQDDDPMIALEDVIDNNLEASYPMEDVYKIAEIAEWCLQEDPMERPEMRDVVRALTQIVMSSIEWEASLGGNSEVFSGLYSG

SEQ ID NO: 63 - protein, 618 aa, Prunus persica
MASLHHLPCLLLSLWLTQFPAGFASDASIKATFINPLSCSAKIMTCNASLYHINISLNKEQIASFYSVFPSEVNPIKHNSKQDYLISVPCSCKNISGTVGYFYDTTYKVKPSDTFYDVSNQIYSGQPLSVKEELPKFVPEANFPIHLPCGCVESDSQIVVTYTVQEHDTLSDIGILLSAKIDNIENMNKNMTENPSFIVVGWVLFVPMEKNGLKTSKTGIRPKWIILIGIILAVTLLSICTLILLLYRRRTPEKKVEVPNKSVSRSSKSLAAHRSFSLHNQLLHKENMEDGPVFESDGPVIFGVEQIEEATGYFDETRKIGEGGYGSVYFGVIGEKEIAVKKMKSNSTKEFFAELKVLCKIHHINVVELLGYASGDDHLYLVYEYVQNGSLSEHLHDPLLKGHQPLSWTARTQIALDAAKGIEYIHDHTKARYVHRDIKTSNILLDEGLRAKVADFGLAKLVGRTNEEDIIATRLVGTPGYLPPESVKELQVTHKTDVFAFGVVLAELITGQRALFRDNREPEKMKSLITVIKKIFQDEDPESALEAATDGNLRSNYPMEDIFKMAEIAEWCLSEEAVERPEMREIVVMLSQIMVSSIEWEASLGGNSQVFSGVFNGR

SEQ ID NO: 64 - protein, 610 aa, Rosa chinensis
MASVDLLHCLILTVFLAFSFAVSVQTSDIVPFQCSAATIARCNASLYHINSGFQKEEIASFYSVNPSQVNPIKYHNKDDHLISVPCSCKSIFNTTGYFYDTIYKVKPSDTFDDVSNNIYSGQVLSVIEERKHNFTIGADFPIHLPCGCVDSDSQIVVTYTVQDKDTLTDIATLLSAKIENIESMNKNQVENPSYIQPGWVLFVPSEKNGLKKPGSRHKWAILVGILSVVTLLSLSTFILLLFRRKAAAKENMEAPKVVSKTLSANKSFSLHNQLLHQQYMEDATVFESDGPVVFSLEEIEEATGYFDESKIIGEGGYGKVYFGVLGEKEVAIKKMRSNMCKEFFAELKVLCKIHHINVVELLGYASGHDHLYLVYEYIQNGSLSEHLHDPLLKGHQPLSWTARTQIALDTAKGIEYIHDHTKARYVHRDIKTSNILLDEGLRAKVADFGLAKLVGRTNEEDIIATRLVGTPGYLPPESVQELQVTHKTDVFAFGVVLGELITGQLALFRDNREPAKMKSLITVIKKVFQDGEPDLALEAVTDPSLQGNYPIEEIFKMAEISEWCLSEEAVGRPEMREIVVLLSHIVTTSTEWEASLGGNSQVFSGLFSGR

SEQ ID NO: 65 - protein, 617 aa, Vitis vinifera
MITSMALCNLLPLVFPLLLPLLADLLPRVSALESSIKSTFMYPFPCSESIKICNSSLYHINNGLQAEQIAFFYSVNRSEITYVKNQDYLVTVPCSCQKINDIAGYFYHTTYPVKKDDTFVNVSGQIYSGQAWSFGGEESKFIEGHEVDIYLPCGCVERKSQIVVTYTVQLHDTLSDIATLLSAKISGIESMNSILIQNSEYIDVGWVLFIPREKNGLSKDKEGTKHKWAIIISILAAVTVLSISTLIIIVLRRNRSQKNSEEDPKVSKSLSSNRTFSFRNQHLQENIEDVPGFESERPVIFSLEEIEDATNNFDETRKIGEGGYGSVYFGVLGEQEVAIKKMRSNKSKEFFAELKVLCKIHHINVVELLGYASGDDHLYLVYEYVQNGSLNDHLHDPLLKGNQPLSWTARTQIALDAARGIEYIHDHTKARYVHRDIKTSNILLDETLRAKVADFGLAKLVGRTNEEDFIATRLVGTPGYLPPESVKELQVTSKTDVFAYGVVLAELITGQRALVRDNREPNKMRSLITVVNEIFHNEDPEIALEDAIDRTLRGSYPLEDAYKMAEIAERCLSEEAVDRPKMREIVVILTQIMTSALEWEASLGGNSQVFSGLFSGR

SEQ ID NO: 66 - protein, 614 aa, Ziziphus jujuba
MESHGLLPSLLLLLTTLFSGVSTNIDVSIKSTLMSPFSCSSQIRTCNASLYYINYGTLREDQIAAFYSVSVSQMKPITYGNKQDYLITVPCSCNTIGGTTGYFYDTIYKVKAGDSFVNISAQIYSGQALRVGTELFMPEIDFTMHLPCGCVESDTQTVATYTVQLHDTVSSIATLLSAKVENVVSLNRNLTENPAFIDIGWVLYVPMEKNGIENPKPGRRNKITIIIIIALAAVTTLSVAALLAILLKRRRSKQKSEEDPKAVSKALRARSFSLQKYFSNKENMEDMADFEPERPVIYTLEEIEEATSHFDESKIVGEGGYGSVYFGALGQQEVAIKKMKSNLSKEFFAELKVLCKIHHINVVELLGYACGDDHLYLIYEYIQNGSLRDHLHDPLLKGHQPLSWAARAQIALDAAKGIEYIHDHTKVRYVHRDIKTSNILLDEGLRAKVADFGLAKLVGRANEEDPVATRLVGTPGYLPPESVKELQVTPKADVFAFGVVLAELITGQRALIRDNRVPNKMKSLITVVKDIFGDENPESALEAEIDGNLRSSYPIEDVFRMAEISQSCLSEEAVERPEMRDIVVALSHIVSSAREWEDSLGGNSQVFSGIFKFI

SEQ ID NO: 67 - protein, 615 aa, Coffea arabica
MASGTRKCGYLVFLLPLCVLFMGTSAYPTQISRIYPFACSNSIKTCNSYLYQHNGFKKEQIASYYSVNTSQIRPITDNNRNDYLVTVPCSCKNVNGTDGYFYDTDYTLQRNDTFANVSNQIYSGQAWKVGGEENYTAGLNATMHLLCGCVESDSQIVVTYTVQPLDTLSSIADLLASDVDGIQSLNTYLAANPSYLDIGWLLYVPMEKSGVSPIKKDSQKKREWKIAVSILAVVTMLSVCTLLVILLRRKRPQRNSGEDPKMFSKSITSNKSYSLHKHFQSKGNSEDITAIESEKPVVYTLEEIAEATGNFDESRKIGEGGYGSVYLGIMGKQEVAVKKMRSSKSKEFLAELKVLCKIHHINAVELLGYASGDDHLYLVYEYIPNGSLSEHLHDPLLKGHQPLSWTARTQIALDAARGIEYIHDHTKARYVYRDIKTSNILLDETLRAKVADFGLVKLVGRTNEDELMATRLVGTPGYLPPESVKELQVTTKTDVFAFGVVLAELITGKRALFRDNMEPQKMKSLITILNSAFEDEDPESALESIVDGNLRGSYPMEDVYKMAEISQWCLSGDAINRPEMREVVVALSQIRVSSVEWEASLGGNSQVFSGVFNGR

SEQ ID NO: 68 - protein, 616 aa, Solanum pennellii
MASWCCILIFYFLFPLIFPKIITNFTSAIPTQLTNVHPFPCSDHIKTCNALLYQHNSLSKQNITFFYSVNASAIEPISYDDRQDYLINVPCTCKDVNGTVGYFYDTIYNLQSGDTFANVSNDIYSGQAWKVGGEDKSYKAGENVTMHLLCGCVEDEEKTVVTYTVQQHDTLSTIGDSLSSQVSDIESLNPYLIRPQFVDVGWLLYVPMYKNGVPLPRKNHKAHKWMVLVGILSAVTVLSICTVIVFILRRNRLQRRTKEDAAAVSKSFSTKKTMSLQKQYMYKDHTEEMPVFESERPVIYSLEEIAEATSDFDESRIIGAGGYGSVYYGTIGKQEVAIKKMRSNKSKEFMAELKVLCKIHHINVVELLGYASGDDHLYLVYEYVPNGSLNEHLHQPMLKGHKPLSWTTRTQIAVDTARGIEYIHDHTKSRYVHRDIKTSNILLDEAMRAKVADFGLAKLVGRTNEDEFLATRLVGTPGYLPPESVKELQITTKTDVFAFGVVLAELITGKRALIRENGDPNKMKSLISIIHEIFQDEDPDSALESFIDENLKGCYPMEDIHKMAEIAEWCLSENAINRPEMREVVVSLSQIRISSTEWEASLGGDSLVFSGVFNGR

SEQ ID NO: 69 - protein, 621 aa, Solanum lycopersicum
MASWCCILIFYFLFPLIFPKIITNITSAIPTQLTNIHPFPCSDHIKTCNALLYQHNSLSKQNITFFYSVNASAIEPISYDDRQDYLINVPCTCKDVNGTVGYFYDTIYNLQSGDTFANVSNDIYSGQAWKVGGEDKSYKAGENVTMHLLCGCVEDEEKTVVTYTVQQHDTLSTIGDSLSSQVSDIESLNPYLIRPQFVDVGWLLYVPMYKNGVPLPSTGKLYLNHKAHKWMVLVGILSAVTVLSICTVIVFILRRNRLQRRAKEDAAAVSKSFSTKKNMSLQKQYMYKDHTEEMPVFESERPVIYSLEEIAEATSDFDESRIIGAGGYGSVYYGTIGKQEVAIKKMRSNKSKEFMAELKVLCKIHHINVVELLGYASGDDHLYLVYEYVPNGSLNEHLHQPMLKGHKPLSWTTRTQIAVDTARGIEYIHDHTKSRYVHRDIKTSNILLDETMRAKVADFGLAKLVGRTNEDEFLATRLVGTPGYLPPESVKELQITTKTDVFAFGVVLAELITGKRALIRENGDPNKMKSLISIIHEIFQGEDPDSALESFIDENLKGCYPMEDIYKMAEIAEWCLSENAINRPEMREVVVSLSQIRISSTEWEASLGGDSLVFSGVFNGR

SEQ ID NO: 70 - protein, 619 aa, Nicotiana attenuata
MASWGCILILYFLFPLISPKITRNLASDAPTQLTNIYPFPCSDHIKTCSAFLYQHNGLSKQNITKFYSVNESAIKPISYDDRQDYLVTVPCTCKDVNGTVGYFYDTSYKLQLLDTFANVSNDIYSGQVWKVGGEEQSYKAEDVVTMHLLCGCVEDDQKTIVTYTVQQRDTLSSIGDLLASQVSDIEKLNPSLTSPQFVDIGWLLYVPMYKNGVLLPSTAGKKHKAHKWTILVGILSAVTVLSMCTVMIFIIRRNRLQKRAKEDRAAIYKSLSTNKTMSLQKQYMYKDQTEDIPVFESERPVIYSLEEIAEATSDFDESRIIGQGGYGSVYYGTIGKQEVAIKKMRSNKSKEFIAELKVLCTIHHINVVELLGYASGDDHLYLVYEYIPNGSLNEHLHQPMLKGHKPLSWTTRTQIALDTARGIEYIHDHTKSRYVHRDIKTSNILLDEAMRTKVADFGLAKLVGRTNEDEFLATRLVGTPGYLPPESVKELQITTKTDVFAFGVVLAELITGKRALIRENGDPNKMKSLISIIQEIFQDEDPESALESFIDGNLKECYPMEDIYKMGEIADWCLSENAINRPEMREVVVALSQIRISSTEWEASLGGDSVVFSGLFDGR

SEQ ID NO: 71 - protein, 610 aa, Trema orientale
MATHHLLPYLLLMFPLCSRVFTLHVSMKESLMYPFSCSAQIKTCNASLYHINEGLTIEEIAAYYKVNASSQIEPIMHDSRKDYLITVPCSCSSMFGVTGYFYNTTYNVKLNDTFLDVSAKYYSGQAWRFEEEDQYFKPDKNFTMHLLCGCLESDSEIVVTYTVQDHDTLLNIAARLSANFDNLVRLNGHLTQNPAFILVGWVLFVPKEKNGIETSTGMREKWKIVTGILLIVTLLSTGALMVILLRRKRLQQKKVEDPKVISKIVTFKKSLSLQNPFLPKENFEDFDSEKTVVFSLEAIEEATGHFDESKKVGEGGYGCVYFGILGEKEVAIKKMISNKSKEFFAELKVLCKIHHINVVELLGYASGDDHLYLVYEYVPNGSLSDHLHDPLLKGHQPLSWTARAQIALGAANGIEYIHDHTKARYVHRDIKTTNILLDEGLRAKVADFGLAKLVERANEDDFIATRLVGTPGYLPPESVKELQVTPKTDVFAFGVVLAELITGQRALIRDNREPNKMKSLKTVVKRIFQDEDPESALDAEIDGNLRGSYPSEDVFKMAEVAELCLREEAVDRPEMRDIVVTLSQIVMSSIEWEASLGGNSQVFSGVFTGR

SEQ ID NO: 72 - protein, 610 aa, Trema levigatum
MVTYHLLPYLLLMFPLCSRVFTLHVSMKESLMYPFSCSAQIKTCNASLYHINEGLTIEEIAAYYKVNASSQIEPIMHDNREDYLITVPCSCSSMFGVTGYFYNTTYNVKLNDTFLDVSAKYYSGQAWRFEEEDQYFKPDKNFTLHLLCGCLESDSEIVVTYTVQDHDTLLNIAARLSANFDNLVRLNGHLTQNPAFILVGWVLFVPKEKNGNKTSTGMREKWKIVTGILLIVTLLSTGALMVILLRRKRLQQKKVDDPKVLSKIVTIKKSLSLQNPFLPKENFEDFDSEKTVVFSLEAIEEATGHFDESKKVGEGGYGCVYFGILGEKEVAIKKMRSNKSKEFFAELKVLCKIHHINVVELLGYASGDDHLYLVYEYVPNGSLSDYLHDPLLKGHQPLSWTARAQIALGAAKGIEYIHDHTKARYVHRDIKTTNILLDEGLRAKVADFGLAKLVERANEDDFIATRLVGTPGYLPPESVKELQVTPKTDVFAFGVVLAELITGQRALIRDNRESNKMKSLITVVKRIFQDEDTESALEAAIDGNLQGSYPSEDVFKMAEVAELCLREEAVDRPEMRDIVVTLSQIVMSSIEWEASLGGNSQVFSGVFTGR

SEQ ID NO: 73 - protein, 616 aa, Juglans regia
MASHRSFLTHLLPLLATLFATILAFKTSIKSTIINPFDCSAQIKTCDASLYHVGNDLKEEEIAIFYSVDLSQMKTITHGKTDYLISVPCSCMDVNVTSGYFYNTSYPVKLGDTFDGVSAKIYSGQAWKVEGKYLNLTPGTNLSVQLPCGCVESDAQTVVTYTVQEHDTLSGIAELLSAQQSGIQGLNRQLAENPTFIDVGWVLFVPMEKNGVPSQDRSSGSRTHIWTIIIVTLSAVTLISMSALIAVLVRRKRSQQNVEDPKAVAKISSANTIFHLQSQYQDKDNMEDVTGFESERPVIFSLEEIEKATGHFNETKKIGEGGYGRVYFGILGGQEVAIKKMRSSKSKEFFAELKILCKIHHINVVELLGYASGDDHLYLVYEFVRNGSLSGHLHDPLLKGHQPLSWTARAQIALDTAKGIEYIHDHTKARYVHRDIKTSNILLDEGLRAKVADFGLAKLVGRTNDEDFLATRLVGTPGYLPPESVKEFQVTPKTDVFAFGVVLAELITGLRALICDNGEPGKMKSLITIISKVFQDDDPEIALEAVIDGNLHSSYPFEDVFKMAEIAEWCMSEDAGNRPEMRDIVMTLSKIVMSSVEWEASLGGNSQVFSGLFNGR

SEQ ID NO: 74 - protein, 614 aa, Datisca glomerata
MKASFNSLSCLFFLVVFAYFSDISSSISNETMSPMTCSSQNKPCNASLYHINNGLNESEIASSYSVKVSQIRTIMVGSRQDYLISVPCSCQAVNGISAYFYSTFYNVQIGDSSDSISEGRYNGQAFMVGKNQTLFPGKNSVQLLCGCVESESEIVVTYTVQRHDTLSQIATLLSAHESNIESLNRNLIKNPQFIDEGWVLFVPMEKNGILQPTSTKEKSRQWIIIVGILSAVSIISICSLIIIILRRKRLQQSNEEDPKLAVSKSLSGNRNFSLQHLSLNKENMQDAPGFKTEKPVVFTIEQIEEATNNFDETQKIGEGGYGTVYFGVIGDQEIAVKKMKSNKSKEFLIELRVLCKIHHINVVELLGYASGDDHLYLIYEFVQNGSLSDHLHDPLLKGYQPLSWTARTQIALDAAKGIEYIHDHTKAQYVHRDIKTTNILLDESLRAKVADFGLAKLVGRTNEDDLIATRLVGTPGYLPPESVKELQVTPKTDVFAFGVVLAELITGTRALVRDKQEPNKTKSLIKLVNKIFEDEDPETALEASVDGNLQGNYPFEDAYKMAEIAAWCLSEDAVNRPEMREIVTTLSQIVQAAIEWEASLGGNSQVFSGLFSGR

SEQ ID NO: 75 - protein, 610 aa, Theobroma cacao
MLITMASHPLLITLPLLAILLARICAANVSMYSFPCSQDIKKCDALLYHINSGLKEEQIASYYSVDPSTFRPISHGNNQDYLIPVPCSCEDIGNGTTGYFYDASYTVQENDTFAEVSARIYNGQALEVGGEEGSFITGNKVSMHLLCGCLESHSETIVTYTVQLGDVLADIASLLSANLNDVQRLNGNLTRNPDVIFAGSVLYVPMENDRIPAPKKGKVKWTIIIVILSALTVLSTIALLIILIRRKKAQQINEEDPKPSKSLSARAFSLQNQLLYTENIEEVTAFESERPVIYSLEEIEEATSHFDETKKIGTGGYGCVYFGILAEQEVAIKKMKSNKSKEFFAELKVLCRIHHINVVELLGFASGDDHLYLVYEYVQNGSLNDHLHDPLLKGHQPLSWTARTQIALDAAKGIEYIHDHTKARYVHRDIKTSNILLDEGLRAKVADFGLVKLVERTNEEDLIATRLVGTPGYLPPESVMELQVTPKTDVFAFGVVLAELITGQRALVRDNREPNKMKSLITVVNKIFEEDDSESALEEVIDGNLRGSYPMEDVYKMAELAEWCLSDEAVNRPEMREIVVTLSQIVMSSVEWEASLGGSSQVFSGLFNGR

SEQ ID NO: 76 - protein, 681 aa, Durio zibethinus
MIISQIVCLQRGFCRFQKAGIQPGNCQTITIPNGKYVKTKRTKSTISGSSIFHLLFFLSFVGKKKKIPKLITMASHNLLTCIVFPLLLTLLARICAAGVSMFPCSQDIKKCDALLYHINSGPQKKQIASYYSVDPSTFRYISHRNNQDYLIPVTCTCEDIGNGTKAYLYNASYTVQENDTFAEVSTRIYSGQALEVGGEEKSFITGNKVSMHLLCGCLETQSETIVTYTVQPGDVLSDIATLLSVNINDIQNLNSNLIQNPDDIIAGWVLYVPMENGRIPPPKKGRSKDKWKFVIVLLSAVTLFSTIAFFVILIRRKKAQQVSEEDSKPVSKTMGTRAFSLQSHFLYKENIEDVTALESERPVIYSLEEIEEATSNFDETKKIGTGGYGCVYFGILGQKEVAIKQMKSNKSKEFFAELKVLCKIHHINVVELLGFTSGDDHLYLVYEYVQNGSLNDHLHNPLLNGHQPLSWTARTQIALDAAKGIEYIHDHTKARYVHRDIKTSNILLDKRLRAKVADFGLAKLVERTNEEDLIATRLVGTPGYLPPESVTALQVTPKTDVYAFGVVLAELITGQRALVRDSQEPNKMKSLIAVVNKIFEEEDPKSTLEEAIDGNLRGSYPMEDVYKMAELAEWCLSDDPVKRPEMREIVITLSQILMSSVEWEASLGGSRHVFSGIFEGR

SEQ ID NO: 77 - protein, 625 aa, Populus euphratica
MTFHNFLLGLLITLMTTLVAIVFASDDSTNSPNMYPFTCSDSEDIKICNASLYHTNYDSLQKEQLASIYGVSPAQIISISYASRQDYLVTVPCSCKNINGTAGYFYDAIHNASQGEIFSNVSAQIFNGQAWWVEDEAHLFNTGYNFSMHLLCGCTKSKSQIVVTYTVQQHDTLSEISTRLSSTVGGIQSMNINLIKNPSSIIVDWVLFVPMDSKPASGKGEYEFFPKFSRSGRGHKWIIIVGILSALTALSIITLVILLLRRKGCRQNSEDDSKPVSKSMSTNRAFSLQDLYKESNEDGTAFESEKPVVFSLEEIEEATKSFDKTKKIGEGGYGCVYHGLLRGQEVAVKKMRSNKSHEFFAELKVLCKIHHINVVELLGYAGGDDHFYLIYEYVRNGSLSDHLHDPLLKGHQPLSWTARAQIALDAAKGIEYIHDHTKARYVHRDIKTSNILLDEGLRAKVADFGLAKLVERTSDEDLIATRLVGTPGYLPPESVKELQVTSKTDVFAFGVVLAELITGQRALLRDNRESTKMKSLITVVYKIFEDKDPETALADVIDKNLRNSYPMEDVYKMAEIADWCLSEEAINRPQMREVVQKLSMIVVSSVEWEASVGGSSIFSGVFNGR

SEQ ID NO: 78 - protein, 613 aa, Ricinus communis
MSSDNLLPSFLIPLLLTLLVRVFASNNSMHPFTCSEESNHVRMCNASLYHINKGLQIDQIAYFYNVSITQITPILNGDRKDYIIMVPCSCENVNGTKAYFYDAIYQVKENDTFLNVSDQMYSGQAWEVGNESSTFITGYQVPMHLLCGCVESESQIVVTYTIEQQDTLSDIASRLSSTTSGILDMNSFVIKDPNFLRPDWVLFVPKEINGIPTPNTESGKRQKWAIIISILSVVTLLLMITVIIIVLRMKISQPNNKEDPKALSKSMSTIRGHSLQILNMDIIEDGTAFESEKPVIYSPEEIEEATNNFDESRKIGAGGYGSVYFGELAGQEVAIKKMKSNKSKEFFAELKVLCRIHHINVVELLGYASGDDHLYLVYEYIQNGSLSDHLHDPLLKGYQALSWTARTQIAVDAAKGIEYIHDHTKTRYVHRDIKSSNILLDEGLRAKVADFGLAKLVERTNDEDLIATRLVGTPGYLPPESVKELQVTTKTDVFAFGVVLAELITGQRALVRDNWEPTKTRSLITVVYKIFEDDDPETALENSVDRNLQGSFPVEDVYKMAEIAEWCLNEDPINRPEMRDIVPNLSKIMTSSVEWEASLGGNSTVFSGIYNGR

SEQ ID NO: 79 - protein, 616 aa, Manihot esculenta
MASYTLLPLLLILLMEVVASASNETGIHPFVCNEDVKKCNASLYHINKGLQMKQVAFLYSVNSTQISPILRENIQDYLVTVPCSCKTVNGTRGYFYDASYKVLKDDTFLNVSKQNYSGQAWEVEDEEDIFKTGNEVPMHLLCGCVENDSQVVVTYTVQNQDTLSGIASRLSSTISAILSMNGFLNGDPSFIQEDWVLYIPKEMDGIPAPPPLPSSDTASRKRQNWTIIIGILSATTLLLMTTLIIIFLRRKGSHQNSSKDPKTVSTSMSTTRSRGLSLHILNMEIKEDGTALESDKPVIYTAEEIEEATNNFDETRKIGAGGYGSVYFGVMGEQEVAIKKMKSNKSREFFAEVKVLCKVHHINVVELLGYASGDDHLYLVYEYIRNGSLSDHLHDPLLKGYQPLSWVARTQIALDAAKGIEYIHDHTKKRYVHRDIKSTNILLDEGLRAKVADFGLAKLVERTSDEDLIATRLVGTPGYLPPESVKELQVTTKTDVFAFGVVLAELITGQRALVRDNWEPNKMRSLITVVYKIFEDEDPESALESAVDRNLRGSFPMDDVYKMAEIAEWCLSEDPINRPEIRDILPMLSNIMTSSVEWEASLGGNSPVFSGIYNGR

SEQ ID NO: 80 - protein, 613 aa, Daucus carota subsp. sativus
MASWNLLALLFFLPLPQILCIRFAVSADQLPAINAFNCSLDQSKTCNSLLYQSNGLQPEEIAGYYQVNASDIKNVTNGNKLSYLVQVPCSCKNVNGTIGYFYDTVYKVKAGDSFVNVSAWYYSGQAWPVGGEERTYIPDTEVPVHLLCGCVQSEDQVVVTYTVQQQDTLSKIGDDLSAEVSKIQDLNTNLAQNSTYIQADWVLFVPMEINGLPVPRDVDRIHKWVIIVGVLAAASLLSICTLAIILVRRQRSRKYNEEDLKAHVSKTMSAHKSFSLQNKFLQREDITGFESERPVVYSIEEIAEATMDFDETRKIGEGGYGSVYFGVLGEKEVAVKKMRSNKTKEFLAELKVLCKIHHINVVELLGYASAEDYLYLVYEYVSNGSLGDHLHDPLLKGHQPLSWTARTQIALNTAKGIEYIHDHTKSRYVHRDIKTTNILLDERLRAKVADFGLAKLVGRTNEDDFVATRLVGTPGYLPPECVKELQVTTKTDVFAFGVVLAELITGQRALIRDNREPNKMKSLITVINKIFQDEDPVKVLQSVIDGNLKGSYPTEDVYRMAEIADWCLSEDPISRPEMREIVVALSQTMISSVEWEASLGGNSQVFSGVFSGR

SEQ ID NO: 81 - protein, 612 aa, Citrus sinensis
MATLYLFPCLLFFSSLASAFGSGIPIKPSVMDSFPCNEHINTCNALLYHINQGLPVERIASFYSVNPSQIKPIFRGNQKDYLITVPCSCKDVNSTRGYFYDTSYKVQPNDTFVNVSAMIYSGQAWKVGGEENYFIAGVAVPIHLLCGCVETGTQVVVTYTVQQQDTLSIIATLLSAEISGIESMNKMVAQNPGYIDVCWVLFVPMELNGLPTAEKSGKTHKWVTVIALLSAVALFSVITLIIILLRRKRPEEKITEDAKHVSKAMSITTRAFSSQGQCKENTEDVTVLESERTIIFSLEEIEEATNNFDESRIIGRGGFGNVYFGLLGDREAAIKKMRSNKSKEFFAELKVLCKIHHINVVELFGYASGDDHLCLVYKYVRNGSLSDHLHDPLLKGHQPLTWTARTQIALDAAKGIEYIHDHTKARYVHRDIKTSNILLDDGLRAKVADFGLVKLEERTNEKEMLATRLVGTPGYLPPESVMELQVTTKTDVFAFGVVLAELITGKRALIRDDSEPTKMKSLITIVNEVFRDEDPESALEEIIDGNLGSSYPLENVYKMAAVAEWCLNEDAVDRPEMRDIVAILSQIMITSTEWEASLGGDSQVFSGLFNGR

SEQ ID NO: 82 - protein, 618 aa, Citrus unshiu
MPLVTTMATLYLFPCLLFFSLLASAFGSGIPIKPSVMDSVPCNEHINACNALLYHINQGLPVERIASFYSANPSQIKPIFRGNQKDYLITVPCSCKDVNGTRGYFYDTSYKVQPNDTFVNVSAMIYSGQAWKVGGEENYFIAGVAVPIHLLCGCVESGTQVVVTYTVQQQDTLSIIATLLSAEISGIESMNKMVAQNPGYIDVCWVLFVPMELNGLPTAEKSGKTHKWVTVIALLSAVALLSVITLIIILLRRKRPEEKITEDAKHVSKAMGITNRAFSSQGQCKENTEDVTVLESERTIIFSLEEIEEATNNFDESRIIGRGGFGNVYFGLLGDREAAIKKMRSNKSKEFFAELKVLCKIHHINVVELFGYASGDDHLCLVYKYVRNGSLSDHLHDPLLKGHQPLTWTARTQIALDAAKGIEYIHDHKKARYVHRDIKTSNILLDDGLRAKVADFGLVKLEERTNEKEMLATRLVGTPGYLPPESVMELQVTTKTDVFAFGVVLAELITGKRALIRDGSEPTKMKSLITIVNEVFRDEDPESALEEIIDGNLGSSYPLENVYKMAAVAEWCLNGDAVDRPEMRDIVAILSQIMITSTEWEASLGGDSQVFSGLFNGR

SEQ ID NO: 83 - protein, 614 aa, Vigna unguiculata
MASLTPLLPFLFPFLATSFVTVFAFQVSIKPYNLSPLNCSAKITCNASLYHISHNLTIQQIASFYSVTSSHITPIKHGTKQDYLVTVPCSCKHTSDLSGYFYDTIYKVRPRDTFVNISNLVFSGQAWPVNGTFHPDENLAIHLPCGCSESGSQIIVTYTVQPDDTPTLIADLLNASLVDMMSMNNVLTPNFKFIDAGWVLFVPKGSKGVLPSTAAENEKKLKWTTTIIGILAGVTLLSVTTTIILFVRVNKVTQMSSEDSHLFSRRSMANRTISSKYNFQKEYIEDVISLESERPIVYNLEDIEEATNNFDESRRIGSGGYGSVYFGVLGNKEVAVKKMRSNKSKEFYAELKVLCKIHHINIVELLGYANGEDDLYLVYEYVPNGSLSDHLHDPLLKGNQPLSWSVRVQIALDAAKGLEYIHDYTKARYVHRDIKSSNILLNDKFRAKVGDFGLAKLVDRTDDENFIATRLVGTPGYLPPESLKELQVTPKTDVFAFGVVLSELLTGKRALFRESKEEIKMKSLISVVNKIFQDDEPEIALEDAIDKNLEASYRMEDVYKMAEIAEWCLEEDPIERPEMRDIIGALSQIVMSTIEWEASLCGNSQVFSGLYSGR

SEQ ID NO: 84 - protein, 628 aa, Vigna radiata var. radiata
MFSLFSLLHQGSFYITTMASLTPLLPFLFPFLATSFVTVFSFQVSIKPTNLSPLSCSDKILTCNASLYHISHNLTIQQIASFYSVTSSHVTPIKHGTKEDYLITVPCSCKHTSDLSGYFYDTTYKVKLHDTFVNISNLVFSGQAWPVNGTLHPDENLAIHLPCGCSESDSQIVVTYTVQPDDTPTVIANLLNASLVDMMSMNKVLAPNFNFIDVGWVLFVPKGSKGLLPGTAAKLKWTTTIIGILAGVTFLSVTTTIILIVRVNKVNQMIGEDSHLISRRSMANRTISSKFNFQKESIEDVISLESERPIVYNLEEIEEATNNFDESRKIGSGGYGSVYFGVLGNKEVAVKKMRSNKSKEFYAELKVLCKIHHINIVELLGYANGEDDLYLVYEYVPNGSLSNHLHNPLLKGNQPLSWSVRVQIALDAAKGLEYIHDYTKARYVHRDIKSSNILLDDKFRAKVGDFGLAKLVDRTDDENFITTRLVGTPGYLPPESLKELQVTPKTDVFAFGVVLSELLTGKRALFRESQEEIKMKSLISVVNTIFQDDEPEIALEDAIDKNLEASYRMEDVYKMAEIAEWCLQEDPIERPEMRDIIGALSQIVMSSIEWEASLCGNSQVFSGLYSGR

SEQ ID NO: 85 - protein, 615 aa, Phaseolus vulgaris
MASFTPLLAFVFPLLTTFPTVFAFEVSIKATNLSPLYCSAKITTCNASLYHTSHNLTIHQISSFYSVTSSHITPIKHGTKQDYLLRVPCSCKHTSDLSGYFYDTTYKVRPHDTFSNISNLVFSGQAWPVNGTLHPDENLAIHIPCGCSESDSQIVVTYTVQPNDTPTLIANLLNASLADMLSMNKILDPNFKFIDVGWVLFVPKGSKGLLPSTAAGNEEKKLKWATTIIGILAGVTFLSVITTIILIVRVNKENQKNSEDSRLISRRSIANRTISSKYNFQKEYIEDVVSLESERPIAYNLEVIEEATNNFDESRRIGSGGYGTVYYGVLGNKEVAVKKMRSNKSKEFYAELKVLCKIHHINIVELLGYANGEDDLYLVYEYVPNGSLSDHLHDPLLKGNQPLSWSVRVQIALDAAKGLEYIHDYTKARYVHRDIKSSNILLNDKFRAKVGDFGLAKLVDRTDDENFIATRLVGTPGYLPPESLKELQVTPKTDVFAFGVVLSELLTGKRALFRESQEEIKMKSLISVVNKIFQDDDPEIALEDAIDKNLEASYRMEDVYKMAEIAEWCLQEDPIERPEMRDIIGALSQIVMSSTEWEASLCGNSQVFSGLYSGR

SEQ ID NO: 86 - protein, 615 aa, Glycine max
MISFTNLLSLLFPLFTTSFVRVFASEVSIKTTNLSPLNCSSKIRTCNASLYHISQNLTIEQIASFYSVISSQITPIMHGIKQDYLIRVPCSCKNTSGLSGYFYDTTYKVRPNDTFANISNLIFSGQAWPVNHTLQPNETLAIHIPCGCSESKSQVVVTYTVQPNDTPMMIANLLNSTLADMQNMNKVLAPNIEFIDVGWVLFVPKESKGLLLLPSATKKKHNKWTTIIIGILGGMTLLSIVTTIILILRRNKVDKISIEDSRLISGRSIANKTISSKYSLHKEFVEDLISFESERPLIYNLEDIEEATNNFDESRKIGSGGYGSVYFGILGNKEVAVKKMRSNKSKEFYAELKVLCKIHHINIVELLGYANGEDYLYLVYEYVPNGSLSDHLHNPLLKGNQPLSWSARVQIALDAAKGLEYIHDYTKARYVHRDIKTSNILLDNKFRAKVGDFGLAKLVDRTDDENFIATRLVGTPGYLPPESLKELQVTPKTDVFAFGVVLSELLTGKRALFRESHEDIKMKSLITVVNEIFQDDDPETALEDAIDKNLEASYPMEDVYKMTEIAEWCLQEDPMERPEMRDIIGALSQIVMSSTEWEASLCGNSQVFSGLFSGR

SEQ ID NO: 87 - protein, 636 aa, Glycine soja
MYSTSLLHQGSFYFTTMISFTNLLSLLFPLFTTSFVRVFASEVSIKTTNLSPLNCSSKIRTCNASLYHISQNLTIEQIASFYSVISSQITPIMHGIKQDYLIRVPCSCKNTSGLSGYFYDTTYKVRPNDTFANISNLIFSGQVWPVNHTLQPNETLAIHIPCGCSESKSQVVVTYTVQPNDTPMMIANLLNSTLADMQNMNKVLAPNIEFIDVGWVLFVPKESKGLLLLPSATSTNIEEKKHNKWTTIIIGILGGMTLLSIVTTIILILRRNKVDKISIEDSRLISGRSIANKTISSKYSLHKEFVEDLISFESERPLIYNLEDIEEATNNFDESRKIGSGGYGSVYFGILGNKEVAVKKMRSNKSKEFYAELKVLCKIHHINIVELLGYANGEDYLYLVYEYVPNGSLSDHLHNPLLKGNQPLSWSARVQIALDAAKGLEYIHDYTKARYVHRDIKTSNILLDNKFRAKVGDFGLAKLVDRTDDENFIATRLVGTPGYLPPESLKELQVTPKTDVFAFGVVLSELLTGKRALFRESHEDIKMKSLITVVNEIFQDDDPETAIEDAIDKNLEASYPMEDVYKMTEIAEWCLQEDPMERPEMRDIIGALSQIVMSSTEWEASLCGNSQVFSGLFSGR

SEQ ID NO: 88 - protein, 612 aa, Lupinus angustifolius
MASSLSQLLFSLLLLLLATSLVNVFSSKASTKSSTYMEPFKCSAKIMSCNASLYHISYGINIEEIASFYSVSPSQIKPIMRGTKQDYLITVPCSCKKTIDLSGYFYDATYKVNPNDSFLDIKTMIYSGQAWPNNSVLVSNENLVIHIPCGCSESDSQIVVTYTVQWSDTPTSITNLLNATFDGLVSMNQVLNQNPSFIDIGWVIFVPMELNGLPQPNGKGKKHIWVIIIGILAGVASLSIITMIFLIFGRKKPYETSEDGPNIVSKRSIANRTISLKNQFHRESLEGQFETERPVVYTLEEIEDATNNFDETRKIGVGGYGEVYFGMLEKEVAVKKMKSTKSKEFYAELKALCNIHHINIVELLGYASGDDHLYLVYEYVPNGSLSEHLQDPLLKGHQHLSWCARTQIALDAAKGLEYIHDYTKSRYVHRDVKTSNILLDEKLRAKVADFGLAKLVERTNDEEFIATRLVGTPGYLPPESLKELQVTVKTDVFAFGVVLSELITGKRALFRDSKETTKMKSLIAVVNGIFLDDEPEAALQEVIDVNLQSNYPVEDIYKMAELAHWCMREDPVDRPEMREVVGTLSQIVMSSIEWEASLGGDSQVFSGVFNGR

SEQ ID NO: 89 - protein, 623 aa, Arachis ipaensis
MSSSLNNLLCLLFSLLATSSSIRVSAFRVSMKTTYMDPLSCSVEAANTCTASLYHITHDDYSLEEIAFYYSVNSSQIKPIKYGTRQDYLITVPCSCKNTQNLSGYFYHTTYKNVKHGDIFVDISASVYSGQAMLITQSLIPGKDLEIDIPCGCSEDEGQRVVTYTVQQNDTPETISLLLNATLPALLRMNKILAQKPGFIDIGWVLFVPLELNGVHGVPPQPPEKTKRNWPMIVGIVVGVLLLSVIIITILIILWRRRVHQITRNDSTVVSKRSFVNRNITLHNSTLYKEYMGDVMQIESERPVIYGLEEIEEATNNFDEARKIGVGGYGSVYFGILEQKEVAVKKMRSNKTKEFYAELKALCKIHHINIVELLGYARGEDHLYLVYEYVSNGSLSEHIHDPLEQGHQPLSWNARVQIALDAARGIEYIHDHTKARYVHRDIKTSNILIDEKLRAKVADFGLAMLVDRSNDENFIATRLVGTPGYLPPESVKELQVTPKTDVFAFGVVLAELITGKRALFRDKNEEGTKMKSLISLVHQIFQDAEPENGLEDVIDKNLEANYPIEYVLKVAEIAGRCLQEDPVERPEMRDLVGALSQIVMNSIEWEASLGGNSQVFSGVFTGR

SEQ ID NO: 90 - protein, 615 aa, Populus euphratica
MAAQNNRQFHLHHVYFFAIILTHVLSSNVFIESSSTMYPFSCSDQVQNCDSYLYHISEGLSIEQIASFYSVKSSNVEPITHGLKQDYLVSVPCTCKDVNGTQGYFYDTIYSVQSGDIFANVTWVLYSGQAWEVPGVERLFIAGDKISVHLVCGCVEVETKEIVTYTVQENDTLTGIAELLSAELTGIKNLNERLIRNPSLIDVGWVLFVPREKNGIQAPKQGKQHHLAIILGTLSAVTLFSVCSMLLFLHRRNTNHKNRKEDPEVVNKAQSPTRTSLRALSREKYIEDATFESERPVVYSLKEIDEATSQFDESRKIGAGGYGIVYIGTLKEREVAIKKMKSSRSKEFYSELKVLCKIHHINVVELLGYATGDNHLYLVYEYIQNGSLNDHLHDPLLKGHSPLSWLARAQIALDAARGIEYIHDHTKARYVHRDIKTSNILLDRGLGAKVADFGLARLVERSNEEDAVATRLVGTPGYIAPESVRELQMTSKTDVFSFGVVLAELITGQRALARDNLQPNKMKVLVSVMIAIFRDQDPETALEANIDENMEGSYPMDEVYKMAELSTHCMNEDPTNRPEMREIVQKLSKIVMSSIEWEASLGGSSQVFTRLFDGR

SEQ ID NO: 91 - protein, 587 aa, Zea mays
MTKHGLLFFLAIALLLHRHYTSASSTGQPTRSSSTASRSTAEWQPLHCSPVSSCGSFLYVTPGGRNLSEIASVFNGNASLIQPVKRLSGSEDLLMAVACECQAISNTTTAAAFLHDTQYKVEPDAIPDDVKSNTFSGLAMDVGDGFPLTPGATVTVRLPCGCSSSTASKGVLSYSVQEEDTLSTIASLFSSSPEAILNLNPSVKNPDFIKPGWILFVPMGVAGSSKKKRVGSTTITIAASVSAIILSVCVLTVILRLRRRPSQQNAEAPEIKMERAPNIDPFQTERPVIFSLKVVGDATANFDEKRKIGEGGYGSVYLGFIGTHEIAVKKMRASKSKEFFAELKALCKVHHINVVELIGYAAGDDHLYLVYEYVQNGSLSEHLHDPLLKGHQPLSWTARTQIALDAARGIEYIHDHTKACYVADFGLVKLVERSDEEEWVATRLVGTPGYLPPESVLELHMTTKSDVYAFGVVLAELITGLRALIRDNKEVNKTKSIISIMRKAFDSEDLERSLETIIDPNLKDSYPIEEVCKMANVSMWCLSEDPLNRPEMRDTMPALCQIHLASIEWEASLGGDGEVFSGVSYGR

SEQ ID NO: 92 - protein, 722 aa, Hordeum vulgare
MPPRRRLLLLLLALACSGGGAAVDTAPGNGTSSPLACSELSRVCTAFLAFPAAGNASVLQSMFDASPGDLTSDPAASPGYAFVRKNCSCLASRTYLANTTYTIPSTVPLNATAAQVAAAAYGGLAVPPPGGALQRPPRPGAVVALHLICGCSSGPWNYLLSYVGSDGDTVESLSSRFGASMDAIEAANGMPGPDPITTGKVYYIPLNSVPGQPYVAMSSAPVPAPAPTQNTLSEISDHHSAKFPYGWVIGGMGVALALIAIALLALLMCKSFQYNHQGSNNQGKSPDQPMPHNFQLLKSGSFCYGSGRYFCCQFGNAKQSRKGGEDHHINVPKGMVVDVFDREKPIVFTYEEILASTDLFSDANLLGHGTYGSVYYGVLRDQEVAIKRMTSTNTKEFIVEMKVLCKVHHASLVELIGYAASKDELFLVYEYSQKGSLRNHLHDPQSKGYTSLSWIYRVQIALDAARGLEYIHEHTKDHYVHRDIKSSNILLDGSFRAKISDFGLAKLGLRSNDAEASVTKVVGTFGYLAPEYLRDGLATAKCDVYAFGVVLFELISGKEAITKADAVGASSNSERRSLASVVSFLTCTQAVIQSTACVFAVISLPKVYIGISSTSFYTSNLKDLSRFGLTGQMLTALRNCHDPTCVGSLKDCIDPNLMDLYPHDCIYQMAMLAKQCADEDPVLRPDMKQAVITLSQILLSSIEWEATLGGNSQVFSGLVAGR

SEQ ID NO: 93 - protein, 621 aa, Lablab purpureus
MITQTMASLTSLLSLLIPLLAASCASVTVFSFQASLKTTYLEPFRCSSKIRTCNASLYHISYSHNADDIANFYSVNPSQIKPVMRGTMQDYLITVPCSCNNTNELGGYFYDTTYKVKANDSFVEINNIVYSGQAWPINREVDPNEDLAIHLPCGCSEKSDSQIVVTYTVQRNDTPTSIATLLNATLDGMVSMNEVLAQNPSFIDITWVLYVPRELNGLASKGKKDKKHHIIIGILAGVTFLSIITLIILVVVLRRSRANVAAKDDPNTMSKRSIGNRTISIKNRDFHPEHIEDATPFESERPVIYTLEEIEDATNNFDETRRIGVGGYGSVYFGMLEEKEVAVKKMRSNKSKEFYAELKALCKIHHINIVELLGYASGDDHLYLVYEYVPNGSLSEHLHDPLLKGHQPLSWCARIQIALDAAKGLEYIHDYTKARYVHRDIKTCNILLDEKLRAKVADFGLAKLVERTNDEEFIATRLVGTPGYLPPESVKELQVTIKTDVFAFGVVLSELITGKRALFRDNQEANNMKSLVTVVSQIFKNKYPETVLADVIDWNLQHSYPMEDVYKMAELAHWCLCEDPNDRPEMREIVVALSQIVMSSTEWEASLGGDSQVFSGVLDGR

SEQ ID NO: 94 - protein, 619 aa, Phaseolus vulgaris; identical to SEQ ID NO: 5

SEQ ID NO: 95 - protein, 619 aa, Vigna unguiculata
MIPQTMSSLLSLLIPLLATSCVSVAVFSFQASLKTTYLEPFRCSSMISTCNASLYHISYNHNADDLANFYSVHPSQIKPIMRGTKKDYLVTVPCSCNNTNDDDLGGYFYDTTYKVKPNDSSVEINNVVYSGQAWSINTEVDPNEDLAIHLPCGCSKKSDSQIVVTYTVQRNDTPISIATLLNATLDDMVSMNEVLVQNPSFIDINWVLYVPRELNGLPSKGKEKKHYIIIGILAGVTFFSTITLIILVVVLRRSRASVAAKNDPNIVSKRSIGNRTISIKNRDFHAEHIEDATPFESERPVIYALEEIEDATNNFDETRKIGVGGYGSVYFGMLEEKEVAVKKMRSNKSKEFYAELKALCKIHHINIVELLGYASGDDHLYLVYEYVPNGSLSKHLHDPLLKGHQPLSWCARVQIALDAAKGLEYIHDYTKARYVHRDIKTCNILLDEKLRAKVADFGLAKLVERTNDEEFIATRLVGTPGYLPPESVKELQVTIKTDVFAFGVVLSELITGKRALFRDNQQPNNMKSLVTVVSQIFKNKYPENVLADAIDGNLQHSYPMEDVYRMAEVAHWCLCEDPNDRPVMREIVVALSQIVMSSTEWEASLGGDSQVFSGVLDGR

SEQ ID NO: 96 - protein, 592 aa, Vigna subterranea
MASLTSLLIPLLATSCVSVAVFSFQASLKTTYLEPFRCSSMISTCNASLYHISYNHNADDLANFYSVHPSQIKPIMHGRKQDYLITVPCSCNNTNDLGGYFYDTIYKVKPNDSSAEINNIIYSGQAWSINREVNPDEDLAIHLPCGCSEKNDSQIVVTYTVQRNDTPISIATLLNATLDEMISMNEVLAPNPSFIDITWVLYVPRELNGLPSKGKDKKHYIIIGILAGVAFFSTITLIILVIVLRGSRDTKKVFCLFMVNMAEDATPFESERPVIYALEEIEDATNNFDETRKIGVGGYGSVYFGMLEEKEVAVKKMRSNKSKEFYAELKALCKIHHINIVELLGYASGDDHLYLVYEYVPNGSLSEHLHDPLLKGHQPLSWCARIQIALDAAKGLEYIHDYTKARYVHRDVKTSNILLDEKLRAKVADFGLAKLVERTNDEEFIATRLVGTPGYLPPESVKELQVTIKTDVFAFGVVLSELITGKRAIFRDNQQANHMKSLVTVVSQIFENKYPENVLADAIDGNLQHSYPMEDVYKMAEVAHWCLCEDPNERPVMREIVVALSQIVMSSTEWEASLGGDSQIFSGVLDGR

SEQ ID NO: 97 - protein, 546 aa, Vigna angularis
MITQTMASLTSLLSLLIPLLATSCVSVAVFSFQASLKTTYFEPFRCSSMISTCNASLYHISYNHNADDLANFYSVHPSQIKPIMRGTKQDYLITVPCSCNSSNDLGGYFYDTTYKVKPNDSSVEINNIAYSGQAWSINREVNPNEELAINLPCGCSEKNDSQIVVTYTVQRSDTPISIATLLNATLENMVSMNEVLVQNPSFIDISWVLYVPRELNGLPSNGKDATPFESERPVIYALEEIEDATNNFDETRKIGVGGYGSVYFGMLEEKEVAVKKMRSNKSKEFYAELKALCKIHHINIVELLGYASGDDHLYLVYEYVPNGSLSEHLHDPLLKGHQPLSWCARVQIALDAAKGLEYIHDYTKARYVHRDIKTCNILLDEKLRAKVADFGLAKLVERTNDEEFIATRLVGTPGYLPPESVKELQVTIKTDVFAFGVVLSELITGKRALFRDNQQANNMKSLVTVVSQTQNALADAIDGNLQHSYPMEDVYKMAEVAHWCLWEDPNDRPVMREIVVALSEIVMSSTEWEASLGGDSQVFSGVLDGR

SEQ ID NO: 98 - protein, 619 aa, Glycine max
MASSLVALLSLLLTLLATSCLSATVFSLQVSIKTTYLEPFKCSPKITTCNASLYHISYGNNIDDIATFYSVSTSQIKPIMRTTEQDYLITVPCSCNDTNGLGGYFYDTTYKVKSNDTFVNINNFVYSGQAWPINGELDQNEELTIHLPCGCSEKSDSQIVVTYTVQRNDTPVSIAALLNATLDDMVSMNEVLAQNPSFIDVTWVLYVPRELNGLPLSKGKDKKQKLEIIIGILAGVTLLSIITLIILSVVLRRSRANKTAKNDPSVVSKRSITNRTISIKNRDFHTEYIEDATTFESERPVIYALEEIEDATNNFDETRRIGVGGYGTVYFGMLEEKEVAVKKMRSNKSKEFYAELKALCRIHHINIVELLGYASGDDHLYLVYEFVPNGSLCEHLHDPLLKGHQPLSWCARIQIALDAAKGLEYIHDYTKARYVHRDIKTSNILLDEKLRAKVADFGLAKLVERTNDEELIATRLVGTPGYLPPESVKELQVTIKTDVFAFGVVLAELITGKRALFRDNQEASNMKSLTSVVGQIFKDDDPETVLADAIDGNLQRSYPMEDVYKMAELAHWCLCEDPNVRPEMREIVVALSQIVMSSTEWEASLGGDREVFSGVLDGR

SEQ ID NO: 99 - protein, 613 aa, Medicago truncatula
MASLIQLLSIFLPLLASSLPTIFSIEVSMKKAYMEPYKCSTKMRTCNASLYHINYNHNIEQIANFYSIDPSQIKPIIRSTKQDYLVKVPCSCKNIKDLSGYFYETTYKVSPNETSVDIMNLIYSGQAWQVNEDLVANENVTIHIPCGCSEFESQIVVTYTVQQSDTPTSISLLLNATIDGMVRINQILGPNPTFIDIGWVLYVPKELKGSPLYHGKEKKHKWVIIIGILVSVTLLSVITLIIFILRRNKAYETSKYDPKTVSKRSFGNRTISLRNHEFHKEYMEDATQFDSERPVIYDFEEIEHATNNFDETRRIGVGGYGTVYFGMLEEKEVAVKKMKSNKSKEFYAELKALCKIHHINIVELLGYASGDDHLYLVYEYVPNGSLSEHLHDPLLKGHQPLSWCARTQIALDSAKGIEYIHDYTKARYVHRDIKTSNILLDEKLRAKVADFGLAKLVERTNDEEFLATRLVGTPGYLPPESVKELQVTIKTDVFAFGVVISELITGKRALFRDNKEANNMKSLIAVVNKIFQDEDPVAALEAVVDGNLLRNYPIEGVYKMAELSHWCLSEEPVDRPEMKEIVVAVSKIVMSSIEWEASLGGDSQVFSGVFDGR

SEQ ID NO: 100 - protein, 615 aa, Trifolium pratense
MAYLIHHHLSLFLLFLAFSLTSVFSIEFSIKKSYMEPFKCSTKIKTCNASLYHINYDHNIEQIANFYSVDSSQIKPIIRSTKQDYLIKVPCSCKKTNELSGYFYDTIYTARRNESFVDVKNLVYSGQTWQDGEDLAANENVTIHIPCGCSEFESEIVVTYTVQQNDTPTSISLLLNATVDGIVRMNQILVPNPSFIDIGWVLYVPDEELKRSSHSNRKEKKHKWVIIIGILLSVTLLSVITVIVLILRRNKAYPTSKTDPRTFSKRSLANRTISLRNHEFHKEYMEDATQFESERPVIYDFEEIEVATNNFDETRRIGVGGYGTVYFGMLEDKEVAVKKMKSTKSKEFYAELKALCKIHHINIVELLGYASGDDHLYLVYEYVPNGSLSEHLHDPLLKGHQPLSWCARAQIALDSAKGIEYIHDYTKSRYVHRDIKTSNILLDEKLRAKVADFGLAKLVERTNDEEFLATRLVGTPGYLPPESVKELQVTIKTDVFAFGVVLSELITGKRALFRDNKEANNMKSLIAIVNKIFEDVDPVTALEAVVDGNLQRNYPIEDVYKMAEVSHWCMSENPVDRPEMKETVIVLSKIVMSSIEWEASLGGDSQVFSGVFDGR

SEQ ID NO: 101 - protein, 641 aa, Castanospermum australe
MITTMASLTQLLSLILLPLLATSFVRVFSLEVSIKATNLVPFNCSATIRTYNALLYHINHNLKIEEIASFYSVNSSQIKPIVHGTKQDHLITVPCSCKNVSDLSGCFYDTSYKVKPNDNFVDISDQIYSGQAWPVNGVLEIDKNLTIHIPCGCSESDSQIVVTYTVQQNDTPTSIADLLNATLDGMVSMNNVLAKNPSFIDVGWVLFVPKELKGLPPALSNRPREVCARRHSNFSCFGFPLLAEKKHKWAIIIGILAGVTLLSIITMIILILRRNRASETSRDDPNAVSKRSIANRSTISLKNPNLHKEYMEDATPFESERPVIYTVEEIEDATNNFDETRRIGVGGYGSVYFGMLGEKEVAVKKMRSNKSKEFYAELKVLCKIHHINIVELLGYASGEDHLYLVYEYVPNGSLSDHLHDPLLKGHQPLSWSARVQIALDAAKGLEYIHDYTKAQYVHRDIKTSNILLDEKLRAKVADFGLAKLVERTNDEDFIATRLVGTPGYLPPESVKELQVTLKTDVFAFGVVLSELVTGKRALFRDSQEPTKMKSLITVVNKIFQDDDPETALEDAIDGNLQRNYPMEDVYKVAEIAEWCLREDPVERPEMREIVGALSQIVMSSIEWEASLGGSSQVFSGLFSGR

SEQ ID NO: 102 - protein, 615 aa, Nissolia schottii
MASFTQLFSLLLVASFVSVSSLKRSIKTTNYLEPFKCSTNIRSCNASLYHINYDLNIEEIASYYTVNSSQIKPIMRGTKQDHLITVPCSCKSTNNLSGYFYDTSYKVKQNDNFLDINTLIYSGQAWPINASEFLFPGEDLAIHIPCGCSSEESESQIVVTYTVQRSDTPTAIARLLNATLGGMESMNEALAQNPSFIDVGWVLFVPRELNGLPLPRKAEKKHKWVAIIGIFAVVTLLSIVTVIILILRRNRANETRKDHLNAVSKRSISSRANPLKNSVHHKEYMQDATQFDPERTVEYSLEEIEDAMNNFDENRKIGVGGYGSVYFGMLDQKEVAVKKMRSNKSKEFYAELKALCKIHHINIVELLGYASGDDHLYLVYEYVPKGSLSDHLHDPLLKGHQPLSWCARIQIALDAAKGLEYIHDYTKARYVHRDVKTSNILLDEKLRAKVADFGLAKLVERTNDEEFIATRLVGTPGYLPPESVKELQVTIKTDVFAFGVVLSELITGKRALFRDGQEANKMKSLIAVVNKMFQDDDTQTALEDVIDVNLQHNYPVEDVYKMAELAHWCLREEPVERPEMKEMVAALSHIVISSIEWEASLGGDSQVFSGVFVGR

SEQ ID NO: 103 - protein, 616 aa, Cercis canadensis
MCTTMASFNFFHSLLFLPLLGNSFAIGVSIKAAVLNPFNCSAKITTCNASLYHINHDLKIEEIASSYSVNLSQIKPIIHGSRRDYLITVPCSCKNTSDLSGYFYDTIYTVKQSDTFLGITNKVYSGQAWPINRTLFPNDNLTIRLPCGCSESDSQIVVTYTVQQNDTPAEIANLLNATLVNMLRINPILVENPSFIDVNWVLFVPMELNGLPSSLQTGKKHHWTTIIAILASVTLLSVITMFTLILILRRNRANEISKEDPKAVSKNSAPDRTHTLKNNLHRENMEDTAAFESERHRVFSLGEIEEATNNFDETRKIGVGGYGIVYFGTLGDQEVAIKMMRSNKSKEFYAELKVLCKIHHINIVELLGYASGEDHLFLVYEYVANGSLSDHLHDPLLKGYQPLSWAARVQIALDTAKGLEYIHDYTKARYVHRDIKTSNILLDEKLRAKVADFGLAKLVERTNDDDDFIATRLVGTPGYLPPESVKELQVTPKTDVFAFGVVLAELITGKRALFRDSKEASNMKSLITIVNKVFQNDDPEAALENEIDGNLRGSCPKWDVYKTAEIAEWCLSEEPSNRPEMREVVVTLSQLVMSSTEWEASLGGDSPVFSGLFNGR

SEQ ID NO: 104 - protein, 615 aa, Vigna subterranea
MASFTPLLPFLFPLLATSSVTVFAFEVSVKPTNLSPLNCSAKITTCNASLYHISHNLTIQQIATFYSVTSSHITPIKHGTKQDYLITVPCSCKHTSDLSGYFYDTTYKVRPRDTFVNVSNLVFSGQAWPVNGTLNPDENLAIHIPCGCSESVSQIVVTYTVQPDDTLTVIANLLNASLSDMMSMNKVLAPNFKFIDAGWVLFVPKGSKGPLPSTAAVNEKKLKLTTTIIGILAGVTFLSVTTTIILIVRVIKVNQMRTEDSRLFSRRSIANRTISSKYNFQKEYIEDVISLESERPIVYSLEEIEEATNNFDENRRIGSGGYGSVYFGVLGNKEVAVKKMRSNKSKEFYAELKVLCKIHHINIVELLGYANGDDDLYLVYEYVPNGSLSDHLHDPLLKGNQPLSWSVRVQIALDAAKGLEYIHDYTKARYVHRDIKSSNILLNDKFRAKVGDFGLAKLVDRTDDENFIATRLVGTPGYLPPESLKELQVTPKTDVFAFGVVLSELLTGKRALFRESQEEIKMKSLISVVNKIFQDDEPEIALEDAIDKNLEASYRMEDVYKMAEIAEWCLQEDPIERPEMRDIIGALSQIVMSSIEWEASLCGNSQVFSGLYSGR

SEQ ID NO: 105 - protein, 614 aa, Vigna unguiculata; identical to SEQ ID NO: 83

SEQ ID NO: 106 - protein, 615 aa, Vigna radiata
MASLTPLLPFLFPFLATSFVTVFSFQVSIKPTNLSPLSCSDKILTCNASLYHISHNLTIQQIASFYSVTSSHVTPIKHGTKEDYLITVPCSCKHTSDLSGYFYDTTYKVKLHDTFVNISNLVFSGQAWPVNGTLHPDENLAIHLPCGCSESDSQIVVTYTVQPDDTPTVIANLLNASLVDMMSMNKVLAPNFNFIDVGWVLFVPKGSKGLLPGTAAVNEKKLKWTTTIIGILAGVTFLSVTTTIILIVRVNKVNQMIGEDSHLISRRSMANRTISSKFNFQKESIEDVISLESERPIVYNLEEIEEATNNFDESRKIGSGGYGSVYFGVLGNKEVAVKKMRSNKSKEFYAELKVLCKIHHINIVELLGYANGEDDLYLVYEYVPNGSLSNHLHNPLLKGNQPLSWSVRVQIALDAAKGLEYIHDYTKARYVHRDIKSSNILLDDKFRAKVGDFGLAKLVDRTDDENFITTRLVGTPGYLPPESLKELQVTPKTDVFAFGVVLSELLTGKRALFRESQEEIKMKSLISVVNTIFQDDEPEIALEDAIDKNLEASYRMEDVYKMAEIAEWCLQEDPIERPEMRDIIGALSQIVMSSIEWEASLCGNSQVFSGLYSGR

SEQ ID NO: 107 - protein, 615 aa, Phaseolus vulgaris; identical to SEQ ID NO: 85

SEQ ID NO: 108 - protein, 616 aa, Lablab purpureus
MASFTRLLPFLFPMLTTSFVTVFAFEVSLQATNFSPLNCSAKITACNASLYHISQNLTIQQIASFYSVTSSQITPIMHATKQDYLITVPCSCKHTSDLSGYFYDTTYKVRPHDTFLNISNLIFSGQVWPVNGTFHPEENLAIHIPCGCSESDSQIVVTYTVQPNDTPTVIANLLNASLADMLSMNKVLPPNFEFIDVGWVLFVPKGSKGLLPSSAADSEENKLQWTTTIMGILAGVTFISVITTIILIVRRNKVNQMRSEDSRLITRRSIANRTISSKYNFQKEYIEDVISMESERPIVYNLEEIEEATNNFDENRRIGSGGYGSVYFGVLGSKEVAVKKMRSNKSKEFYAELKVLCKIHHINIVELLGYANGEDDLYLVYEYVPNGSLSDHLHDPLLKGNQPLSWSVRVQIALDAAKGLEYIHDYTKARYVHRDIKSSNILLNEKFRAKVGDFGLAKLVDRTDDENFIATRLVGTPGYLPPESLKELQVTPKTDVFAFGVVLSELLTGKRALFRESQEEIKMKSLISVVNKIFQDDDPDIALEDAIDKNLEASYRMEDVYKMAEIAEWCLQEDPIERPEMRDIIGALSQIVMSSREWEASLCGNSQVFSGLFSGR

SEQ ID NO: 109 - protein, 564 aa, Vigna angularis
MASLTPLLPFFFPFLATSFVTVFAFQVSIKPTHLSPLSCPAKILTCNASLYHISHNLTIQQIASFYSVTSSHITPIKHGTKQDYLITVPCSCKHSSDLSGYFYDTTYKVRPHDTFVNISNLVFSGQAWPVNGTLNPDENLAIHLPCGCSESDSQIVVTYTVQPDDTPTMIVNLLNASLADIMSMNKVLAPNFKFIDAGWVLFVPKGSKGLLHSTAAVNEKKLKWTTTIIGILAGVTFLSVTTTIILIVRVNKVNQMISEDSHLISRRSIANRTISSKYNFQKECLEDVISLESERPIVYNLEKIEEATNNFDESRRIGSGGYGSVYFGVLGNKEVAVKKMRSNKSKEFYAELKVLCKIHHINIVVPNGSLSDHLHNPLLKGNQPLSWSVRVQIALDAAKGLEYIHDYTKARYVHRDIKSSNILLNDKFRAKVGDFGLAKLVDRTDDENFIATRLVGTPGYLPPESLKELQVTPKTDVFAFGVVLSELLTGKRALFRESQDEIKMKSLISVMAEIAEWCLQEDPIERPEMRDIIGALSQIVISSIEWEASLCGNSQVFSGLYSGR

SEQ ID NO: 110 - protein, 615 aa, Glycine max; identical to SEQ ID NO: 86

SEQ ID NO: 111 - protein, 570 aa, Cajanus cajan
MVSFTQLLSLLFPLMATTSAFEVSIKATYLAPLNCSAKIRTCKASLYHITQNLTIEQLASFYSVISSQITPIMYGTKQDYLITVPCSCKNTSDLSGYFYDTIYKVKPNDTFVNISNLIFSGQAWPVNDTSQLHPDENLRIYIPCGCLESDSQIVVTYTVQPNDTTTMIANLLNATLAGMLSINKILAPNPEFIDVGWVLFVPTESKGLIPSSTNKDEKTSKWTTPVIGILAGMTLLSVIITIILILRRNKVKQITREDLQIISRRSIANRTISSKYSLHKEYMEDVISFESERPVIYNLEEIEEATHNFDETRKIGSGGYGSVYFGMLENKEVAVKKMRSNKSKEFYAELKVLCRIHHINIVELLGYANGEDDLYLVYEYVPNGSLSDHLHDPLLKGNQPLSWSARVQIALDAARGLEYIHDYTKARYVHRDIKTSNILLDDKLRAKVGDFGLAKLVDRTNDESFVATRLVGTPGYLPPESLKELQVTPKTDVFAFGVVLSELLTGKRALFRESQEDIKMKSLITVVNKIFQDDDPETALEDAIDKNLEASYPMEDVYKVRLISMIIFSS

SEQ ID NO: 112 - protein, 623 aa, Arachis hypogaea
MASSLNNLLCLLFSLMATSSSIRVSAFRVSMKTTYMDPLSCSVEAANTCTASLYHITHDDYSLEEIAFYYSVNSSQIKPIKYGTRQDYLITVPCSCKNTQNLSGYFYHTTYKNVKHGDIFVDISASVYSGQAMLITQSLIPGEDLEIDIPCGCSEDEGQRVVTYTVQQNDTPETISLLLNATLPAFLRMNKILAQKPGFIDIGWVLFVPLELNGVHGVPPQPTEKTKRNWPMIVGIVVGVLLLSVIIITILIILWRRRVHQITRNDSTVVSKRSFVNRNITLHNSILFKEYMGDVMQIESERPLIYGLEEIEEATNNFDEARKIGVGGYGSVYFGILEQKEVAVKKMRSNKTKEFYTELKALCKIHHINIVELLGYARGEDHLYLVYEYVSNGSLSEHIHDPLEQGHQPLSWNARVHIALDAARGIEYIHDHTKARYVHRDIKTSNILVDQKLRAKVADFGLAMLVDRSNDENFIATRLVGTPGYLPPESVKELQVTPKTDVFAFGVVLAELITGKRALFRDNNEEGTKMKSLISLVHQIFQDAEAENGLEDVIDKNLEGNYPIEYVLKVAEIAGRCLQEDPVERPEMRDLVGALSQIVMNSIEWEASLGGNSQVFSGVFTGR

SEQ ID NO: 113 - protein, 623 aa, Arachis hypogaea; identical to SEQ ID NO: 89

SEQ ID NO: 114 - protein, 593 aa, Arachis ipaensis
MKTTYMDPLSCSVEAANTCTASLYHITHDDYSLEEIAFYYSVNSSQIKPIKYGTRQDYLITVPCSCKNTQNLSGYFYHTTYKNVKHGDIFVDISASVYSGQAMLITQSLIPGKDLEIDIPCGCSEDEGQRVVTYTVQQNDTPETISLLLNATLPALLRMNKILAQKPGFIDIGWVLFVPLELNGVHGVPPQPPEKTKRNWPMIVGIVVGVLLLSVIIITILIILWRRRVHQITRNDSTVVSKRSFVNRNITLHNSTLYKEYMGDVMQIESERPVIYGLEEIEEATNNFDEARKIGVGGYGSVYFGILEQKEVAVKKMRSNKTKEFYAELKALCKIHHINIVELLGYARGEDHLYLVYEYVSNGSLSEHIHDPLEQGHQPLSWNARVQIALDAARGIEYIHDHTKARYVHRDIKTSNILIDEKLRAKVADFGLAMLVDRSNDENFIATRLVGTPGYLPPESVKELQVTPKTDVFAFGVVLAELITGKRALFRDKNEEGTKMKSLISLVHQIFQDAEPENGLEDVIDKNLEANYPIEYVLKVAEIAGRCLQEDPVERPEMRDLVGALSQIVMNSIEWEASLGGNSQVFSGVFTGR

SEQ ID NO: 115 - protein, 593 aa, Arachis duranensis
MKTTYMDPLSCSVEAANTCTASLYHITHDDYSLEEIAFYYSVNSSQIKPIKYGTRQDYLITVPCSCKNTQNLSGYFYHTTYKNVKHGDIFVDISASVYSGQAMLITQSLIPGEDLEIDIPCGCSEDEGQRVVTYTVQQNDTPETISLLLNATLPAFLRMNKILAQKPGFIDIGWVLFVPLELNGVHGVPPQPTEKTKRNWPMIVGIVVGVLLLSVIIITILIILWRRRVHQITRNDSTVVSKRSFVNRNITLHNSILYKEYMGDVMQIESERPVIYGLEEIEEATNNFDEARKIGVGGYGSVYFGILEQKEVAVKKMRSNKTKEFYAELKALCKIHHINIVELLGYARGEDHLYLVYEYVSNGSLSEHIHDPLEQGHQPLSWNARVQIALDAARGIEYIHDHTKARYVHRDIKTSNILVDEKLRAKVADFGLAMLVDRSNDENFIATRLVGTPGYLPPESVKELQVTPKTDVFAFGVVLAELITGKRALFRDNNEEGTKMKSLISLVHQIFQDAEAENGLEDVIDKNLEGNYPIEYVLKVAEIAGRCLQEDPVERPEMRDLVGALSQIVMNSIEWEASLGGNSQVFSGVFTGR

SEQ ID NO: 116 - protein, 614 aa, Nissolia schottii
MASLTKFLHLLFPLLATSFVRVFAFEVSIKTTYLAPFSCSEKIRTCNASLYHISHSFSLEQIASFYSVKPFQIKPIMYGTRQDYQITVPCSCKNIEDLSGYFYDTTYTVIPNDIFVNISTIVYSGQAWPLFPVNRTLVPGEDLTIHIPCGCSEDVFQRVVTYTVQHNDIPQTIALLLNATLPAMLSVNKILAQNPNFIDIGWVLYVPLELNGVSPPNTDEKKHKWPIIIGVLAGMTLLSIIIIIILILRRNRGHQTITEDSAVVSRRSIANRNVSLHNSSLYKEYMADVMQLDSERPVTYDLEEIEEATDNFDEARKIGVGGYGSVYFGKLGQKEVAVKQMRSNKTREFYAELKALCKIHHINIVELLGYASGEDHLYLVYEYVANGSLSEHLHDPLQKGHQPLSWSARVQIALGAAKGLEYIHDHTKARYVHRDIKTSNILIDEKLRAKVADFGLAKLADRTNDENFIATRLVGTPGYLPPEAVKELQVTPKTDVFGFGVVLAELITGKRALFRDNSQEGTKMKSLISVVHNIFQDAKPETALEDVMDKNLEASYPMEDMAEIAAWCLQENPGERPEMRDVVGALSRIVMSYIEWEASLGGNSQVFSGLFDGR

SEQ ID NO: 117 - protein, 533 aa, Lupinus angustifolius
MRGTKQDYLITVPCSCKKTIDLSGYFYDATYKVNPNDSFLDIKTMIYSGQAWPNNSVLVSNENLVIHIPCGCSESDSQIVVTYTVQWSDTPTSITNLLNATFDGLVSMNQVLNQNPSFIDIGWVIFVPMELNGLPQPNGKGKKHIWVIIIGILAGVASLSIITMIFLIFGRKKPYETSEDGPNIVSKRSIANRTISLKNQFHRESLEGQFETERPVVYTLEEIEDATNNFDETRKIGVGGYGEVYFGMLEKEVAVKKMKSTKSKEFYAELKALCNIHHINIVELLGYASGDDHLYLVYEYVPNGSLSEHLQDPLLKGHQHLSWCARTQIALDAAKGLEYIHDYTKSRYVHRDVKTSNILLDEKLRAKVADFGLAKLVERTNDEEFIATRLVGTPGYLPPESLKELQVTVKTDVFAFGVVLSELITGKRALFRDSKETTKMKSLIAVVNGIFLDDEPEAALQEVIDVNLQSNYPVEDIYKMAELAHWCMREDPVDRPEMREVVGTLSQIVMSSIEWEASLGGDSQVFSGVFNGR

SEQ ID NO: 118 - protein, 631 aa, Faidherbia albida
MTTIAMASFSPLHPSLTHLSLLATLFVTVFSFQTSIKASYMVPFKCSEKTNTCNALLYHINRGFDIERIASLYSVNSSHIQPITRGTTQDYLISVPCSCKIVTDLRGYFFDTTYTVEQHETYMDISKFYYSGQAWSPSDNVSVGEILTIHLPCGCTDSDSQIVVTYTVQQNDTVAEIANLLSSTLTGIQNMNEILVNRPSFIDVDWVLYVPKVLNGVPSSKGSGKKLKNFIIIGVLMGVTLLSVITILILTLWRKRATETIKEDAKAVSKRSASRAFSKRSISNRTDLSLKNHQFHIETIEEVTSIDSERPVTFYLEEIEEAINKKSKIIGKGGYGTVYFGILGDKEVAIKEMRSNKSKEFYAELRVLCRIHHINIVELLGYASGEDNLYLVYEYVSKGSLSDHLHDPFLKGHEPLSWTARAQIALDAAKGLEYIHDYTKARHVHRDIKTSNILLDNKLRAKIADFGLVKLLERTNDDDFIATRLVGTPGYLPPESVKELQVTSKTDVFAFGVVLAELVTGKTALFRESQETSRMRSLISVVSQINKVFEDDDPGSALEDIIDKNLRDSYPAADVFKMIEIGERCLREEPIERPEMREIVVILSQILMASIEWEASLGGNSEVFSGIFTGR

SEQ ID NO: 119 - protein, 622 aa, Mimosa pudica
MASFSLLPSLIHISLLATLLVTVSSFQTSIKVSYMAPFKCSESINTCNALLYHINHGLAKDEIASFYSVNSSQIKTISHGTNQDYLITVPCSCKTVTNVRGYFHDTTYIVEKNDTFNNISEFYYSGQAFSPTDHLTIGENLTIHLPCGCIQSDSQIVVTYTVQQNDIVTGIANLLSATPTDIQNMNEVLANGASFIDVGWVLYVPMYLNGIPSSKGSGKGLKHSIILGVLVGLPSLSFITILILILWRKKGTKTNKEDTKVISKRSTSKALSKRSISNRTDLSLRNHQLHIETIEEITSIDSERPVTFYLEEIKEAINKENKIIGKGGYGTVYFGILEDKEVAIKEMRSNKSKEFYAELKVLCRIHHINIVELLGYASGEDNLYLVYEYVSKGSLSDHLHNPFLKGHEPLSWTARAQIALDAAKGLEYIHDYTKARHVHRDIKTSNILLDNKLRAKIADFGLVKLVERTSDDEFIATRLVGTPGYLPPESVKELQVTSKTDVFAFGVVLAELVTGRPALFRDSQETPRMRSLISVINEVFEANDPESSLEDVIDKNLRDCYPVEEVFKMIEIAERCLREEPVERPEMREIVATLSHVLMSSTEWEASLGGNSEVFSGIFTGR

SEQ ID NO: 120 - protein, 628 aa, Chamaecrista fasciculata
MASLNLLPSLALLSLLSTSFLTLSLSQTSNNNSSYISPFKCSEKINTCNASLYHINQNPNPSIENLASLYSVDPSKIKPIMHGTNQDYLITVPCSCRNTSDLSGYFYDTNYTVKQHETFSYISNFYYSGQAWSGSDNITSGQNLTIHLLCGCSESGSQIVVTYTVQKGDTTTAIADLLSATLTGMQQMNEHLAENPDFLVAGWVLYVPKELNGIPSSKSGHKAKHAIIIGVLAGITTLSIMTMVILILWKRKSGNQTSKVFLNSASRRSVARDLSKRSTLSLKNRHLHSENIEGNSNATPFDSERPVIYYLEEIEKATNNFDESRIIGKGGYGSVYFGVLGDKEVAVKVMRSNKSKEFYAELKVLCRIHHINIVELLGYASGEDHLYLVYEYVSNGSLSEHLNDPFSKDHQPLSWTSRVQIALDAAKGLEYIHYYTKERYVHRDIKTSNILLDGKLRAKAQVIADFGLAKLLVQANDEDFVATRLVGTPGYLPPESVKELQVNAKTDVFAFGVVLAELITGKRALFRDSKDANRMRSLISIINMIFQEHDPASALEDVIDKNLQDNYPMEDVFKMAEIAEKCMREDPIERPGMREIVVMLSQIVMSSIEWEASLGGNSQVFSGLFTGR

SEQ ID NO: 121 - protein, 618 aa, Prunus dulcis
MASLHHLPCLLLSLWLTQFPAGFASDASIKATLINPLSCSAKIMTCNASLYHINISLNKEQIASFYSVFPSEVNPIEHNSKQDYLISVPCSCKNISGTVGYFYDTTYKVKPSDTFYDVSNQIYSGQPLSVKEELPKFVPEANFPIHLPCGCVESDSQIVVTYTVQEHDTLSDIGTLLSAKIDNIENMNKNMTENPSFIVVGWVLFVPMEKNGLKTSKTGIRPKWIILIGIILAVTLLSISTLILLLYRRRTPEKNVEVPNKSVSRSSKSLAAHRSFSLHNQLLHKENMEDGPVFESDGPVIFGVEQIEEATGYFDETRKIGEGGYGSVYFGVIGEKEVAVKKMKSNSTKEFFAELKVLCKIHHINVVELLGYASGDDHLYLVYEYVQNGSLSEHLHDPLLKGHQPLSWTARTQIALDAAKGIEYIHDHTKARYVHRDIKTSNILLDEGLRAKVADFGLAKLVGRTNEEDIIATRLVGTPGYLPPESVKELQVTHKTDVFAFGVVLVELITGQRALFRDNREPEKMKSLITVIKKIFQDKDPESALEAATDGNLRSNYPMEDIFKMAEIAEWCLSEEAVERPEMREIVVMLSQIMVSSIEWEASLGGNSQVFSGVFNGR

SEQ ID NO: 122 - protein, 618 aa, Prunus persica; identical to SEQ ID NO: 63

SEQ ID NO: 123 - protein, 629 aa, Prunus mume
MVSLKEQVHTTTMASLHHLPCLLLSLWLTQFPAGFASDASIIATLINPLSCSAEIMTCNASLYHINISLNKEQIASFYSVFPSEVNPIKHNSKQDYLVSVPCSCKNISGTVGYFYDTTYKVKPSDTFYDVSNQIYSGQPLSVKEELPKFVPEANFPIHLPCGCVESDSQIVVTYTVQEHDTLSDIGTLLSAKLENIENMNKNMTEKPSFIVVGWVLFVPMEKNGLKTSKTGEHKWMILIGITLAVTLLSMSTLILLLYRRRTPEKIVEVPNKSVSRSSKSLAVHRSFSLHNQLLHKENMEDGPVFESDGLLIFGVEQIEEATGYFDETKKIGEGGYGSVYFGVIGEKEVAVKKMRSNSTKEFFAELKVLCKIHHINVVELLGYASGDDHLYLVYEYIQNGSLSEHLHDPLLKGHQPLSWTARTQIALDAAKGIEYIHDHTKARYVHRDIKTSNILLDEGLRAKVADFGLAKLVGRTNEEDIIATRLVGTPGYLPPESVKELQVTHKTDVFAFGVVLAELITGQRALFRDNREPEKMKSLIIVIKKIFQDEDPESALEAATDGNLRSNYPMEDIFKMAEIAEWCLSEEAVERPEMREIVVMLSQIMVSSIEWEASLGGNSQVFSGVFNGR

SEQ ID NO: 124 - protein, 605 aa, Rubus occidentalis
MAFPCLILTLFLTLAFSLDVSVKSSVIVPFQCSAKIVTCNASLFHISSGLQKEEIASFYSVNPSEIKPIKYSHKEDHLINVPCSCKNISGTSGYFYDTIYKVKPSDTFYDVSNNIYSGQALSVKEEQVKFSPGADFPIHLPCGCVDSNSQLVATYTVQEKDTLTDIATLLSAKIENIESMNKNLIQNPSFIVLGWVLFVPMEKNGLKNPGSIHKWAILVGILSAVTLLSLSTFILLLFRRKAAEESVEVPKAVSKTLSATKSFSLHNQLLHKQYMEDVTVFESDGPVVFTLEEIEEATGFFDELKIIGEGGYGKVYFGVLGEKEVAIKKMRSNKSKEFFAELKVLCKIHHINVVELLGYASGDDHLYLVYEYVQNGSLSEHLHDPLLKGHQPLSWTARTQIALDTAKGVEYIHDHTKARYVHRDIKTSNILLDEGLRAKVADFGLAKLVGRTNEEDIIATRLVGTPGYLPPESVHELQVTHKTDVFAFGVVLGELITGQRALFRDNREPAKMKSLITVIKKVFQDTNPELALEAATDPSLGGNYPMEEIFKMAEISEWCLSEEAVGRPEMREIVVLLSLIVTTSIEWEASLGGNSQVFSGLFNGR

SEQ ID NO: 125 - protein, 611 aa, Theobroma cacao
MLITMASNPLLITLPLLAILLARICVANVSMYSFPCSQDIKKCDALLYHINSGLKEEQIASYYSVDPSTFRPISHGNNQDYLIPVPCSCEDIGNGTTGYFYDASYTVQENDTFAEVSARIYNGQALEVGGEEGSFITGNKVSMHLLCGCLESHSETIVTYTVQLGDVLADIATLLSANLNDVQRLNGNLTRNPDVIFAGSVLYVPMENDRIPSPKKGRRVKWTIIIVILSALTVLSTIALLIILIRRKKAQQINEEDPKPSKSLSARAFSLQNQLLYTENIEEVTAFESERPVIYSLEEIEEATSHFDETKKIGTGGYGCVYFGILAEQEVAIKKMKSNKSKEFFAELKVLCRIHHINVVELLGFASGDDHLYLVYEYVQNGSLNDHLHDPLLKGHQPLSWTARTQIALDAAKGIEYIHDHTKARYVHRDIKTSNILLDEGLRAKVADFGLVKLVERTNEEDLIATRLVGTPGYLPPESVMELQVTPKTDVFAFGVVLAELITGQRALVRDNREPNKMKSLITVVNKIFEEDDSESALEEVIDGNLRGSYPMEDVYKMAELAEWCLSDEAVNRPEMREIVVTLSQIVMSSVEWEASLGGSSQVFSGLFNGR

SEQ ID NO: 126 - protein, 615 aa, Gossypium raimondii
MLITMVSLSHHLLACLSLPLLVTLLVRICKADDMYPFPCSQEIQKCDAFLYHTNTGLDEVEIASYYSVDPSTFRPISHGNNKDYLIPVPCSCGDTDNGTQAYFYDVYYTVKEGDTFRNVSARFYNGQALEVGGEENNFPTGSKVTMHLICGCLESQSTTVVTYTVQQGDSLSSMATQLSTSINDIQSLNRNLTSNPDFINSGWVLYVPMAKDRIPAVPKRKGGIKWTIIIVILSAVTLFSMIALLIILVRRKAQQMSEEDPKPVSKSISARAFSLQNSFLYKDNIEDVTAFESDRPMIYSLEEIEEATDNFDETKKIGTGGYGYVYHGILGAKEVAVKKMKSSKSKEFFAELKVLCKVHHINVVELLGFASGDDHLYLVYEFVQNGSLNDHLHEPLLKGHQPLSWTARAQIALDAAKGIEYIHDHTKARYVHRDIKTSNILLDKGLRAKVADFGLAKLVERTNEEDLLATRLVGTPGYLPPESVMELQVTPKTDVFAFGVVLAELITGQRALVRDNKEPNKMRSLITVVNNVFEEENPESALEEVIDGSLRGSYPMEDAYKMAELAEWCLSDEAVNRPEMRDVVLTLSKIVMSSVEWEASLGGSSQVFSGVFNGR

SEQ ID NO: 127 - protein, 620 aa, Sclerocarya birrea
MAFDHNLPGSLLILPLLATLLARVSGAHVHISTSNMYSFPCSEKINTCNALLYHINYDISKEQVASFYSVNSSQMKPIFHAKTQDYLITVPCTCKNVNGTTGYFYDTSYTLKQNDTFVDVSAKYYSGQAWEVGGEENDYIAGNVVPIHLLCGCVETDSQIVVTYTVQPHDTLTSIGSLLSAKTSGIESMNAIVAQNPSYIDVGWVLYAPMELNGIPSPKKGWRHKWIIVIGILSTVTLLSVITLIIILFRRNRRRSQQNILDDPKAVSKTLSAASHRVISWQSQYLKENMEDVTAFETERAVIFSLEEIEEATSNFDETKIIGRGGYGSVYFGVLGEKEVAIKKMRSNKSKEFFAELKVLCKIHHINVVELLGFATGDDHLYLVYEYVQNGSLSDHLHDPLLKGHQPLTWTARTQIALDAAKGIEYIHDHTKARYVHRDIKTSNILLDEGLRAKVADFGLAKFVERSDEDEMIATRLVGTPGYLPPESVKELQVTTKTDVFAFGVVLAELITGQRALIRDNREPNKMKSLITVINEVFQDEDPESALEKVIDGNLRSSYPMEDVFKMAEVAEWCLSEDAAGRPEIRDIVVTLSQIIISSTEWEASLGGNSQVFSGLFSGR

SEQ ID NO: 128 - protein, 614 aa, Ziziphus jujuba; identical to SEQ ID NO: 66

SEQ ID NO: 129 - protein, 611 aa, Discaria trinervis
METHDLLPCLLPLLLTTLFSVVSTNIDVSIKSTLMSPFSCSLQINTCNASLYHINYDTLREDEIAAFYSVNVSQMKPITNGNKQHYLIKVPCSCNTILGNTGYFYDTIYKVKPGDSFEDVSAQIYSGQAFRDGTQNFMPETDFSMHLLCGCVESDRQTVATYTVQLGDTISSIAALLSAKVENVVSMNRNLTENPAFIDIGWVLFVPMEKNGIEKPPAGWKHKKMIIIIIVLAAVAMLSLAALLAVLLKRERSKQKSEEDPKAISKTLSAKSFSLQKHFINNENMQDMADFEPERPVIFTLEEIEEATSHFDESKKIGEGGYGSVYFGVLGEQEVAIKKMKSNLSKEFFAELKVLCKIHHINVVELLGYACGDDYLYLVYEFIQNGSLSDHLHDPLLKGHQPLSWAARTQIALDAAMGIEYIHDHTKARYVHRDIKTSNILLDEGLRAKVADFGLAKLVGRANEEDTMATRLVGTPGYLPPESLKELQVTPKADVFAFGVVLAELITGQRALVRDNRVPNKMKSLITVVKSIFGDENPESALEEEIDGNLRSSHPMEDVFRMAEISQLCLSEEAVERPEMRDIVVALSHIVSSAREWEASLGGNSQGQFNK

SEQ ID NO: 130 - protein, 610 aa, Trema orientalis; identical to SEQ ID NO: 71

SEQ ID NO: 131 - protein, 609 aa, Parasponia andersonii
MATHHLLPYLLLMFPLCSRVFTLHVSMKESLMYPFNCSAQIKACNASLYHINEGLTIKEIAAYYKVNASSQIESIMHNNREDYLITVPCSCSSMFGVTGYFYNTTYNVKLNDTFLDVSAKYYSGQAWRFEEEVQYFKPDKNFTMHLLCGCLESDSGIVVTYTVQDHDTLNIANLLSAKFDNLVRLNGYLTQNPAFIEVGWVLFVPKEKNGIKTSTGTREKWKIVTGILLIVTLLSTGALMVILLRRKRLQQKKVEDPQVLSKIVTTKKSLSLQNPFLPKENFEDFHSEKTVVFSLEAIEEATGHFDESKKVGEGGYGCVYFGILGEKEVAIKKMRSNKSKEFFAELKVLCKIHHINVVELLGYASGDDHLYLVYEYVPNGSLSDHLHDPLLKGHQPLSWTARAQIALGAAKGIEYIHDLTKARYVHRNIKTTNILLDEGLRAKVTDFGLAELVERANEEDFIATRLVGTPGYLPPESVKELQVTPKTDVFAFGVELAELITGQRALIRDNREPNKMKSLITVVKRIFQDEDPESALEAEIDGNLRGSYPSEDVFKMTEVAELCLREEAVDRPEMRDIVVTLSQIVMSSIEWEASLGGNGQVFSGVFTGR

SEQ ID NO: 132 - protein, 619 aa, Morus notabilis
MPTTMAFHHFLPYLLLLLLTTLFSGVFGYHVFIKRSLMYPFNCSLQFRTCNASLYHTNDGFTKEQLASFYKVNTSQIKSIMHANKEDFLINVPCSCSSIHGIIGYFFDVLYAVQLNDTFLDVSAKFYNGQAWNFEEELQYFQAGTNFTMHLLCGCSESDSQIIVTYTVQDHDTLSDIATLLSARLSNLVRLNGNLADNPAYIEPGWVLYVPTEKNGIKSSKNGKKHKWEIVLGILISVTVLSNGTLVVILLRRKRSHKKKEEDPKAMSKILSAKKSYSLRKNFVCTETMEDVTGFDSERPVVYGLEQIAEATSDFDETKKIGEGGYGSVYYGVLGEQEVAIKKMRSNKSKEFFAELKVLCKIHHINVVELLGYACGDDHLYLVYEYIQNGTLSDHLHDPLLQGHQPLSWTARTQIALGTAKGIEYIHDHTKARYVHRDIKTSNILLDEGLKAKVADFGLAKLVGRANEGDFIATRLVGTPGYLPPESVKELQVTPKTDVFAFGVVLSELITGKRALIRDNREPNKMKSLITIIKSIFQVEDPESALEAEIDGNLRGSYPIGDVFKMAEIAESCLSEDAVDRPEMSEVVVMLSQVAMSSIEWEASLGGSSQVFSGVFNGR

SEQ ID NO: 133 - protein, 556 aa, Citrus clementina
MATLYLFPCLLFFSSLASAFGSGIPIKPSVMDSFPCNEHINTCNALLYHINQGLPVERIASFYSVNPSQIKPIFRGNQKDYLITVPCSCKDVNSTRGYFYDTSYKVQPNDTFVNVSAMIYSGQAWKVGGEENYFIAGVAVPIHLLCGCVETGTQVVVTYTVQQQDTLSIIATLLSAEISGIESMNKMVAQNPGYIDVCWVLFVPMELNGLPTAEKSGKTHKWVTVIALLSAVALFSVITLIIILLRRKRPEEKITEDAKHVSKAMSITTRAFSSQGQCKENTEDVTVLESERTIIFSLEEIEEATNNFDESRIIGRGGFGNVYFGLLGDREAAIKKMRSNKSKEFFAELKVLCKIHHINVVELFGYASGDDHLCLVYKYVRNGSLSDHLHDPLLKGHQPLTWTARTQIALDAAKGIEYIHDHTKARYVHRDIKTSNILLDDGLRAKVADFGLVKLEERTNEKEMLATRLVNEVFRDEDPESALEEIIDGNLGSSYPLENVYKMAAVAEWCLNEDAVDRPEMRDIVAILSQIMITSTEWEASLGGDSQVFSGLFNGR

SEQ ID NO: 134 - protein, 550 aa, Citrus sinensis
MPLVTTMATLYLFPCLLFFSSLASAFGSGIPIKPSVMDSFPCNEHINTCNALLYHINQGLPVERIASFYSANPSQIKPIFRGNQKDYLITVPCSCKDVNSTRAMIYSGQAWKVGGEENYFIAGVAVPIHLLCGCVETGTQVVVTYTVQQQDTLSIIATLLSAEISGIESMNKMVAQNPGYIDVCWVLFVPMELNGLPTAEKSGKTHKWVTVIALLSAVALFSVITLIIILLRRKRPEEKITEDAKHVSKAMSITTRAFSSQGQCKENTEDVTVLESERTIIFSLEEIEEATNNFDESRIIGRGGFGNVYFGLLGDREAAIKKMRSNKSKEFFAELKVLCKIHHINVFISTFGNGSLSDHLHDPLLKGHQPLTWTARTQIALDAAKGIEYIHDHTKARYVHRDIKTSNILLDDGLRAKVADFGLVKLEERTNEKEMLATRLVGTPGYLPPESVMELQVTTKTDVFAFGVVLAELITGKRALIRDDSEPTKMKSLITIMAAVAEWCLNEDAVDRPEMRDIVAILSQIMITSTEWEASLGGDSQVFSGLFNGR

SEQ ID NO: 135 - protein, 614 aa, Datisca glomerata; identical to SEQ ID NO: 74

SEQ ID NO: 136 - protein, 616 aa, Manihot esculenta; identical to SEQ ID NO: 79

SEQ ID NO: 137 - protein, 623 aa, Ricinus communis; identical to SEQ ID NO: 10

SEQ ID NO: 138 - protein, 622 aa, Begonia fuchsioides
MVVSLSSPTHFLSLLVFATAFAISRGGSSQNMVRMTCSSPNKTCNALLYRVDNGLPENQITTFYSVNSSQIRPIMAANRQDYLITVPCSCGAVMNNMLAYVYNSSYLVKSGDTLGSISDQIYGGQVWILEDKNITTNQTIPIPLLCGCLETESRIVVSYTVQPHDTLSRIADLLSSRVSDIERMNQNLIKDPDSIQEGFVLFVPSDSNGIQEQIPKKDDKHVWTIIAGVPSGVAFILLVSSIFFIVKRKNRPPTDEELQKAGSESSRGKRNFSWKNQNTSKENIESRTKSSRRNVPAFESEKAAIFAIEEIEEATDNFNETRKIGEGGYGTVYFGVIGDQEIAVKKMKSSKSKEFFAELKVLCKIHHINVVELLGYAYGDDHLYLVYEFVQNGSLSDHLHDPLLKGYQPLSWTERTQIALDTAKGIEYIHDHTKSRYVHRDIKTTNILLDKGLRAKVADFGLAKLVGRSNEEDFVATRLVGTPGYLPPESVKELQVTPKTDVFAFGVVLAELITGKRALIRDKNQPNKTMSLIKIINVIFEDDDPEAALEAAIDENLRGNYPLEEMYKMAGIATCCLSEEAVNRPEMREIVAALSQIMDLTVEWEASLGGSSQVFSGIFSGR

SEQ ID NO: 139 - protein, 577 aa, Alnus glutinosa
MTTTMASHSLLPHLLPLLAILFARILASNTSVKASLIYPFNCDAQIKTCNASLYHMNNWLSEEQIASFYSVNLSQMEPIMHGNKQDYLIRVPCSCTDINGTRGYFYNTSYPIKQNDSFDNVSADMYSGQAWSGGSGNDSRFDAGTNFSIHLPCGCVDQSDSLTVVTYTVQDQDTVAGIAALLSAQESDIQRLNRQLTGNLAFIAPGWVLFVPMEKNGIPAPKKGRIWKWPVIIGTLSAVTLLSMSTLIIVLLRRQKSRQQEEDPRAVAKSSSANRISLFQSQYPNKDNIEDATAFESERPVIFSLEEIEEAAGYFDETQKIGEGGYGRVYFGILRGQEVAIKQMRSNKSKEFFAELKILCKIHHINVVELLGYSSGDDHLYLVYEYVRNGSLSSHLHDPLLKGHRPLSWTARTQIALDAAKGIEYIHDHTKARYVHRDIKTSNILLDDGLRAKVADFGLAKLVGRTNEEDFLATRLVGTPGYLPPESVKELQVTPKTDVFAFGVVLAELITGHRALICDNREPSRMKSLITVIKNVFEDESPVVALEAVIDGNLHRSYPLEDVYKVCMTSSIFLIYI

SEQ ID NO: 140 - protein, 597 aa, Casuarina glauca
MASHSLLPYLLPLLASLLSVKASVIYPLGCSAQVKTCNALIYHINNSLSVEEIAFFYSVQISQMKPILHGYKQDYLINVPCSCTNADGATGLFYKTSYHVEQGDTFDSVSSNIYSEQAWSNGGNGSKQIRDPDIPIYLPCGCVEDTSQTVVTYTVQAHDTLSGIALLLSAEQSDIQRLNRNFTKDPSFIEPGWVLFVPMDNKGKTKKWKIIIGTLSAWTLLSVIILIVALRWRKRSQPNVEDPKSVGKSTSSKRTFGYRREALIVIFHCATGFESERPVIFTFEEIEEATNCFDETRKIGVGGYGSVYFAILRKQEVAIKQMKSSKSKEFFAELKVLCKIHHINVVELLGYASGDDNLCLVYEYVRNGSLSSHLHDPLLKGHQPLSWTARTQIALDTAKGIEYIHDHTKARYVHRDIKTSNILLNDGFRAKVADFGLAKLVGQTSDEDFLVTRLVGTPGYLPPESLKELQVTPKTDVFAFGVVLAELITGKRALVIDNGEPNKMKSLINVIKSIFQDEYPEVALELVIDGNLYRSYPLEDIYKMAELADWCLSENPIDRPEMRHVVVSLSQIVMSSVEWEASLGGNSQVFSGLFNGR

SEQ ID NO: 141 - protein, 406 aa, Cajanus cajan
SLLLTLSSCVTVFSFQASIKTTYLEPFKCSPKITTCIASLYHINYGLDIYDIATFYSVNTSQIKPLARGTKQDYLITIPCSCKNTDVLGGYFYETTYKVKPNDTFVNINNVTYSAQAWPINKGLDPDEDLAIHLPCGCSEKSDSQIVVTYTVQQSDTTWSIATLLNATFDGMKSMNEVLAQNPSFIDINWVLYVPRELNGLPSKGKEKKHTIIIGVLAGVSLLSIITLIILIVVLRRSRANATAKNDQSAVSKRSIANRTISLMNRDFHTEIEDATPFESERPVIYTLEEIEDATNNFDETRRIGVGGYGSVYFGMLEGKELQVTIKTDVFAFGVVLAELITGKRALFRDNQEANNMKTLVKVVGQIFKHEDPETVLADTIDGNLQRSYPMEDVYKVIFIKIFYLN

SEQ ID NO: 142 - protein, 593 aa, Fraxinus excelsior
MASLNLILLFCLLRLSILFTRGLVSNSTQINPFNCSSKTPSSCKALLYQHNGFDKDEIASLYSATISEIKQISYAGRHDYLIPVNCSCKNVGGTIGYFYDTIYRIKPNDSFYDISNQIFSGEVWQVAAEDTNLTAGVDLKIHLLCGCVEKDSQVVVTYTVQAHDTVSSIATLLSAQGEEIEKLNPYLAPNPSYIDIGWLLYVPMEKNGIPPPKKASNKGQGWTIIIGVLAAVTLLTMFTLAIILIRRKRCRQYIEEDPKAISKTLSTNKAHSYQKQYTNKEKMEDIRVFESERATVYRGYGSVYFGVLGEKEVAIKKMRSNKSKEFMAELKVLCKIHHINVVELLGYASGDDDLYLVYEYVVNGSLSDHLHDPLLKGHQPLSWNARTQIALDAARGIEYIHDHTKCQYVHRDIKTSNILLNEGLRAKVADFGLAKLVDRTDGDELITTRLVGTPGYLPPESVKELQVTTKTDVFAFGVVLAELITGQRALIRINQEPSKMKSLITVVNNIFDEEDPVSALESIIDRNLKGSYPPQDVYRMAEIAHWCLSEEAIDRPEMREVVVVLTRIRMSSTEWEASLGGSSQVFSGLFDPR

SEQ ID NO: 143 - protein, 614 aa, Solanum lycopersicum
MPRLMASWCCILIFYFLFPLIFPKIITNITSAIPTQLTNIHPFPCSDHIKTCNALLYQHNSLSKQNITFFYSVNASAIEPISYDDRQDYLINVPCTCKDVNGTVGYFYDTIYNLQSGDTFANVSNDIYSGQAWKVGGEDKSYKAGENVTMHLLCGCVEDEEKTVVTYTVQQHDTLSTIGDSLSSQVSDIESLNPYLIRPQFVDVGWLLYVPMYKNGVPLPSTGKNHKAHKWMVLVGILSAVTVLSICTVIVFILRRNRLQRRAKEDAAAVSKKMPVFESERPVIYSLEEIAEATSDFDESRIIGAGGYGSVYYGTIGKQEVAIKKMRSNKSKEFMAELKVLCKIHHINVVELLGYASGDDHLYLVYEYVPNGSLNEHLHQPMLKGHKPLSWTTRTQIAVDTARGIEYIHDHTKSRYVHRDIKTSNILLDETMRAKVADFGLAKLVGRTNEDEFLATRLVGTPGYLPPESVKELQITTKTDVFAFGVVLAELITGKRALIRENGDPNKMKSLISISSINKKRYQLNGQIHEIFQGEDPDSALESFIDENLKGCYPMEDIYKMAEIAEWCLSENAINRPEMREVVVSLSQIRISSTEWEASLGGDSLVFSGVFNGR

SEQ ID NO: 144 - protein, 559 aa, Solanum pennellii
MPRLMASWCCILIFYFLFPLIFPKIITNFTSAIPTQLTNVHPFPCSDHIKTCNALLYQHNSLSKQNITFFYSVNASAIEPISYDDRQDYLINVPCTCKDVNGTVGYFYDTIYNLQSGDTFANVSNDIYSGQAWKVGGEDKSYKAGENVTMHLLCGCVEDEEKTVVTYTVQQHDTLSTIGDSLSSQVSDIESLNPYLIRPQFVDVGWLLYVPMYKNGVPLPSTGKNHKAHKWMVLVGILSAVTVLSICTVIVFILRRNRLQRRTKEDAAAVSKSFSTKKTMSLQKQYMYKDHTEEMPVFESERPVIYSLEEIAEATSDFDESRIIGAGGYGSVYYGTIGKQVELLGYASGDDHLYLVYEYVPNGSLNEHLHQPMLKGHKPLSWTTRTQIAVDTARGIEYIHDHTKSRYVHRDIKTSNILLDEAMRAKVADFGLAKLVGRTNEDEFLATRLVGTPGYLPPESVKELQITTKTDVFAFGVVLAELITGKRALIRENGDPNKMKSLISIMAEIAEWCLSENAINRPEMREVVVSLSQIRISSTEWEASLGGDSLVFSGVFNGR

SEQ ID NO: 145 - protein, 530 aa, Nicotiana benthamiana
MASWGCILLLYFLFPLISPETTRNLASGAPTQLTNIYPFPCSDHTTTCNAFLYQHNGLSKENITKLYSVNVSAIKPISYNDRQDYLVTVPCTCKNVNGTVGYFYDTSYKLQLLDTFANVSNDIYSGQVWKVGGEEQSYKADAVVAIHLLCGCVEDDQKTVVTYTVQQRDTLSSIGDLLTSQVSDIEKLNPSLTRKKHKAHKWTILVGILSAVTVLSMCTVMIFIIRRNRLQKRAKEDRAAIYKSLNIPVFESERPVIYSLEEIAEATSNFDESRIIGQGGYGSVYYGTIGKQYIPNGSLNEHLHQPMLKGHKPLSWTTRTQIALDTARGIEYIHDHTKSRYVHRDIKTSNILLDEAMRAKVADFGLAKLVGRSNEDEFLATRLVGTPGYLPPESVKELQITTKTDVFAFGVVLAELITGKRALIRENGDPNKMKSLISISFTNERVCPLNGQIQEIFQDEDPESALESFIDENLKGCYPMEDIYKMGEIADWCLSENAINRPEMREVVVALSQIRISSTEWEASLGGDSV

SEQ ID NO: 146 - protein, 577 aa, Petunia axillaris
MPRLMASWCCILILYFLFPVSPRITRNLASGAPTQITRIYPFPCSDHSKTCSAFLYQHNGLSKENITKYYFVNASEIKPVSYNDRQDYLVTVPCTCKNVNGTVGYFYDTSYKLQSDDTFQNVSTEIYSGQAWKVGGEELWWAGDVVTIHLLCGCVNEEQKTVVTYTVQAHDTLSSIGASLSSQVSDIENLNPFLAPSPQFVDVGWLLYVPKYKYGVPDPLPSNGGKKHKAHKWTILVGILSAVTVLSMCTVMVFILRRNKLQRRAKGDPAAISKSLSTNKTMSLQKHYLYKDHTEDIPIFESERPVIYSLEEVAEATSNFDASRIIGTGGYGSVYYGMIGKQEIAIKKMKSNKSKEFIAELKVLCKIHHINVVELMGYASGDDHLYLVYEYIPNGSLNEHLHQPMLKGHKPLSWTTRTQIALDTARGIEYIHDHTKSQYVHRDIKTSNILLDEAMRAKVADFGLAKLVGRTNEDDFLATRLVGTPGYLPPESVKELQITTKTDVFAFGVVLAELITAKRALFRENGDPNKMKSLISIIHEIFQDEDPESALESFIDENLNGCYPVEDIYKVGHLNVS

SEQ ID NO: 147 - protein, 597 aa, Mimosa pudica
MSSLTLLSLLLLLFLANPFNMIIKTQAFDKEPMNCSSSTFLQCNASLYHITNNGLTDKKDIASRYSVDVSHLKPIKRPNNNIGHEDYLVTVPCTCLNTKDLSGYFYKTTYTVELGDTVHNISDFVYSGQAWILGNHSLLNISEILTIYLLCGCPTSGSSGNGPQIFVTYTVQKDESLFTIASLLNSTVVDMKYYNWILKSNPSFLGVGWVLFIPSYLNGIPFLNDSHGSTSRDIRLRLVIVTHKRQKDSCLFKIHIGADETAFESEKPGIFSLEEIEEATDYFDETRKIGVGGFGSVYFGVMGEKEVAIKKMRSNKSKEFYAELKILCKVHHINIVELLGYASGEDHLFVVYEYVANGSLSDHLHDPVLKGHQPLSWNARVQIALDAGKGLEYIHDYTKMRYVHRDVKTSNILLDEKLRAKVADFGLAKLIEGTNDEDTNIATRLVGTPGYLPPESVKEFKTTPKSDVFAFGVVLSELVTGKRALFRDSQECNKMKSLITLVNDIFEDNDPEAALENVIDRNLQGCYPPEDVFKVSFNTHTSMIELAERCLREDPSERPDMKQVVEVLTYLVMSSMDWEASLREKSQVFNVLVCKAR

SEQ ID NO: 148 - protein, 593 aa, Malus domestica
  VARIANT 63, 214, 562, 563, 564, 566, 576: Xaa = Any Amino Acid
MAPLNQKFHFFSILFTTFFYTNVLSDNTIGVYPFPCSTSHHTQTCNSSLYHISKGHQIEEIAXFYSVNPSNIRPIVHDNQHPKDYLVSVPCTCKDIKGTQVYLYDTNYLVKEGDTVGNVASEFYSGQAVKIGEEEQQFTVEKMTTFHLVCGCVEKKSQEVVTYTVQDHDTLSDIENLLSAYESEIQKLNKNFTKSPNFIDVGWVLFVPMELNGXRAQQQGKRLSLAAIIGIVSAVGFLLVATFTIFLLIRYRKGKNTEEDVNPNGKKVSLKQQFFKRQMEETFENERPVIYTMEEIEQATNNFDDTRKIGQGGYGSVYFGLLGELEVAIKKMRSSRSKEFFAELKVLCKIHHNNVVELLGYASGSEHLCLVYEFVRNGSLNDHLHDPLLKGNQPLSWTARAQIALDTARGIEYIHDHTKTRYVHRDIKTSNILLDQGLRAKVADFGLARLVERSNEEDIIATRVVGTPGYIPPESVRELQMTSKTDVYAFGVVVAELITGQSAIFRDNREPKRMKSLISVIYAIFKEEDPEAALEAQIDGNMKGSYPMEEVYKMRSSRKGGXXXDXSLPVEKRWRXGGSFGAASPYPSSFRKS

SEQ ID NO: 149 - protein, 553 aa, Malus domestica
  VARIANT 509, 511: Xaa = Any Amino Acid
MAPLNQKFHFFSILFTTFFYTNVLSDNTIGVYPFPCSTSHHTQTCNSSLYHISKGHQIEEIATFYSVNPSNIRPIVHDNQHPKDYLVSVPCTCKDIKGTQVYLYDTNYLVKEGDTVGNVASEFYSGQAVKIGEEEQQFTVEKMTTFHLVCGCVEKKSQEVVTYTVQDHDTLSDIENLLSAYESEIQKLNKNFTKSPNFIDVGWVLFVPMELNGLRAQQQGKRLSLAAIIGIVSAVGFLLVATFTIFLLIRYRKGKNTEEDVNPNGKKVSLKQQFFKRQMEETFENERPVIYTMEEIEQATNNFDDTRKIGQGGYGSVYFGLLGELEVAIKKMRSSRSKEFFAELKVLCKIHHNNVVELLGYASGSEHLCLVYEFVRNGSLNDHLHDPLLKGNQPLSWTARAQIALDTARGIEYIHDHTKTRYVHRDIKTSNILLDQGLRAKVADFGLARLVERSNEEDIIATRVVGTPGYIPPESVRELQMTSKTDVYAFGVVVAELITGQSAIFRDNXEXKRMKSLISVIYAIFKEEDPEAALEAQIDGNMKGSYPMEEVYK

SEQ ID NO: 150 - protein, 610 aa, Pyrus communis
MEMAPLNQKFHFFSILFTIFFYTNVLSDNTIGVYPFPCSTSHHTQTCNSSLYHISKGHQIEEIATFYSVNPSNIKPIVHDDQHPKDYLVSVPCTCKDVKGTQVYLYDTNYLVKEGDTVGNVVSEFYSGQAVKIGEEQQQFTVENMTTFHLVCGCVEKKSQEVVTYTVQDHDTLSDIENLLSAYESEIQKLNKNFTKSPNFIDVGWVLFVPMELNGLRAQQQGKRLSLAAIIGIVSAVGFLLVATFTIFLLIRYRKGKNTEEDVNPNAKKVSLKQQFFKRQMEETFENERPVIYTMEEIEQATNNFDDTRMIGQGGYGSVYFGVLGELEVAIKKMRSSRSKEFFAELKVLCKIHHNNVVELLGYASGSEHLCLVYEFVRNGSLNDHLHDPLLKGNQPLSWTARAQIALDTARGIEYIHDHTKTRYVHRDIKTSNILLDQGLRAKVADFGLARLGERSNEEDIIATRVVGTPGYIPPESVRELQMTSKTDVYAFGVVVAELITGQRAIFCDNREPKRMKSLISVIYAIFKEEDPEAALEAQIDGNMKGSYPMEEVYKMAKIAWGCASEDPVNRPEMKDIVQTLSQILMSSIEWEASLGGKSEVFSGLLMSGR

SEQ ID NO: 151 - protein, 644 aa, Pyrus x bretschneideri
MTKHVKPKPEAILTHLISNAKDHNFSVEMAPSNQKFHFFSILLTTLFHTNVLSDNTTGISSLHLYPFPCSTSHHTQTCNSSLYHVSKGHTTEEIATFYSVNPSNIHPIVHDNQHPQDYLVSVPCTYKNIRGTQIYLYDTNYQVKEGDTVGNVVGEFYSGQAVKIGGEEQLFTVGNMTTFHLVCGCVEKKSQEVVTYTVQDHDTLSDIEKLLSAYESEIQNLNKNFTQSPNFIDVGWVLFVPMELNGLQAQQQGKTLSLAAIIGIVSAVGFLLVATFFIFLLIRYRKGNTTEEEEDVNPNAKKGISIKQQSFKRQMEETIENERPVIHTMEEIEQATSNFDDTRKIGEGGYGSVYFGVLGELEVAIKKMRSSRTKEFFAELKALCKIHHNNVVELLGYASGSEHLCFVYEFLQNGSLNDHLHGPLLKGNQPLSWTARAQIALDTARGIEYIHDHTKQRYVHRDMKTSNILLDQGLRAKVADFGLARLVERSNEEDIVATRLVGTPGYIPPESVRELQMTAKTDVYAFGVVVAELITGQRAIFCDNREPKRMKSLISVIYAVFKEEDPEAALEAQIDGNMKGSYPMEEVYKMAEIALRCASEDPVNRPEMKDIVQTLSQILTSSIEWEALLGGKSQVFSGLLMSGR

SEQ ID NO: 152 - protein, 621 aa, Prunus dulcis
MEMACLNQKHHLLFLVLFTTIYSTHVLSDSVGISSTRLYPFACSDSDQIQSCNSYLYHISKGHQIKEIATFYSVNSSSIKPIVHGTQHQQDYLVSVPCTCKDIKGTKTYLYDTSYLVKQGDTLENVVSEFYSGQAMIVGAEEKPFAGVGNMTTILLVCGCVERSSQEVVTYTVQDHDTLIGIEQLLSAYESEIQNLNINLTQTPNFIDVGWVLFVPMELNGLQPKRQGKRLSLPTIIGVVSAVGFLFVATFIIFLLIRYRKGRNREEDQKSVVNSSAKKGFSLKQQFFKRQMEETFENERPVIYSMEQIEMATSNFDETRKIGEGGYGSVYFGILGELEVAIKKMRSIRTKEFFAELKVLCKIHHNNVVELLGYASGSDHLCLVYEFLQNGSLNDHLHDPLLKGNQPLSWTARAQIALDTARGIEYIHDHTKARYVHRDIKTSNILLDQGLRAKVADFGLARLVERSSEEDMVATRVVGTPGYIPPESVRELQMTSKTDVYAFGVVVAELITGQRAIVRDNREPKRMKSLSSVLYAVFQEKDPEAALEAKVDGNMKGSCPIEEVYKMAEIARRCSSEDPVDRPEMRDIVQTLSQILVCSIEWEASLGGKSQVFSGLIMSGR

SEQ ID NO: 153 - protein, 621 aa, Prunus persica
MEMACLNQKQHLLFLVLFTTIFSTHVLSDSVGISSTRLYPFACSDSDQIQSCNSYLYHISKGHQIEEIATFYSVNSSSIKPIVHGTQHKQDYLVSVPCTCKDIKGTKTYLYDTSYLVKQGDTLENVVSEFYSGQAMIVGAEEKPFAGVGNMTTILLVCGCVERSSQEVVTYTVQDHDTLIGIEQLLSAYESEIQNLNINLTQTPNFIDVGWVLFVPMELNGLQPKRQGKRLSLPTIIGVVSAVGFLFVATFIIFLLIRYRKGRNREEDQKSVVNPSAKKGFSLKQQFFKRQMEETFENERPVIYSMEQIEMATSNFDETRKIGEGGYGSVYFGILGELEVAIKKMRSSRTKEFFAELKVLCKIHHNNVVELLGYASGSDHLCLVYEFLQNGSLNDHLHDPLLKGNQPLSWTARAQIALDTARGIEYIHDHTKARYVHRDIKTSNILLDQGLRAKVADFGLARLVERSSEEDMVATRVVGTPGYIPPESVRELQMTSKTDVYAFGVVVAELITGQRAIVRDNREPKRMKSLSSVLYAVFQEKDPEAALEAKVDGNMKGSYPIEEVYKMAEIARRCSSEDPVDRPEMRDIVQTLSQILVCSIEWEASLGGKSQVFSGLIMSGR

SEQ ID NO: 154 - protein, 652 aa, Prunus mume
MACLNQKHHLLFLVLFTTISSTHVLSDSVGISSNRLYPFACSDSDQIQSCNSYLYHISKGHQIEEIATFYSVNSSSIKPIVHGTQHQQDYLVSVPCTCKDIKGTKTYLYDTSYLVKQGDTLENVVSEFYSGQAMIVGAEEEPFAGVGNMTTMHLVCGCVEKSSREVVTYTVQDHDTLIGIEQLLSAYESEIQNLNINFTQTPNFIDVGWVLFVPMELNGLQPKRQGSDFIVLFAIPIINANFLKLKQYKSNQIFLFKPGKRLSLPTVMAIVSAVGFLFVATFIIFLLIRYRKGKNREEDQKSVVNPSAKKGFSLKQQFFKRQMEETFENERPVIYSMEQIEMATSNFDETRKIGEGGYGSVYLGILGELEVAIKKMRSSRTKEFFAELKVLCKIHHNNVVELLGYASGSDHLCLVYEFLHNGSLNDHLHDPLLKGNQPLSWTARAQIALDTARGIEYIHDHTKARYVHRDIKTSNILLDQGLRAKVADFGLARLVERSREEDMVATRVVGTPGYIPPESVRELQMTSKTDVYAFGVVVAELITGQRAIVRENREPKRMKSLSSVLCAVFQEKDPEAALEARVDGNMKGSYPIEEVYKMAEIARRCVSEDPVDRPEMRDIVQTLSQILVCSIEWESSLGGKSQVFSGLIMSGR

SEQ ID NO: 155 - protein, 600 aa, Fragaria vesca; identical to SEQ ID NO: 11

SEQ ID NO: 156 - protein, 605 aa, Rubus occidentalis
MEMASLNLYLILFTTFSTNVLSSTDGDGAKATRIYPFTCSASDHIQSCNSYLYHISTGYHIEEIASFYSVHVSEVKPIVHGETQKDYLVSVPCSCKDIDGTQMYLYDTNYQVQPRDTFEIVAGEFYSRQALKVEGNMSTIHLVCGCVKKESQEIVTYTVQDHDTLSGIEELLSAYESEIQKYNKNLTENPSFLDVGWVLYVPSEKNGIRAKNQGKRLKVAIATGVLSAVCFVFVAAFIVFLLMRHRTCRNIGEEVHLVNPSAKKRSSLKQQFFKKEMEETFENDRPVIYTMEEIKEATSNFDDTRKIGEGGYGCVYFAILGEVEVAIKKMRSSRTKEFFAELKVLAKIHHNNVVELLGYASGSEHLCLVYEFVQNGSLNDHLHDPLLKGHQPLSWTARAQIALDTARGIEYIHDHTKTRYVHRDIKTSNILLDQGLRAKVADFGLARLVERSNEEDIVATRVVGTPGYISPESVRELQMTSKSDVYAFGVVLGELITGQRAIVRDNREPKRMKSLVSVLYAVFEETDPEIALEAKIDGNLKGSYPMEEVYKMGEIARWCSSEDPVNRPEMRDIVQSLSQILMSSVEWEASLGGKSEVFSGLFSGR

SEQ ID NO: 157 - protein, 446 aa, Ziziphus jujuba
MAFLNYQYLFLILFITICINVVIKSTSMQPFSCSDEVQTCKSYLYHISKGLQIDQIASFYSVNASEIKPIIHGTKQDYLVSVTCTCKNINGVQGYFYDTFYKVQSGDLYSHVVQQFYSGQAWDIEGEDEPFVAGNITIMHLLCGCVEKQSQRVVTYTAQEHDTLSQIAELLSASLSETQELNGGLLTQNPSFIDVGWVLFVPMEMKGIKAPKQGKRQNLATIIGISSAAALLLMAAFLVFLLRYYKNREEDPKAFAKPSSPQNQKFNKDIEGVTTFETERPVVYSIEEINEATGNFDEIRKIGEGGYGSVYFGILGKREVAIKKMKSSRTKEFFSELKVLCKIHHINVVELLGYASGEDHLYLVYEYIHNGSLNDHLHDPLLKGHQPLSWTARAHIALDAARGIEYIHDHTKTRYVHRDIKTSNILLDQGLRAKVLIAILASIIPK

SEQ ID NO: 158 - protein, 610 aa, Ziziphus jujuba
MAINHLLLLCLFLILFITICINVVSSNVVIKSTSMQPFSCSDEVQTCKSYLYHISKGLQIDQIASFYSVNASEIKPIIHGTKQDYLVSVTCTCKNINGVQGYFYDTFYKVQSGDLYSHVVRQFYSGQAWDIEGEDEPFVAGNITIMHLLCGCVEKQSQRVVTYTAQEHDTLSQIAELLSASLSETQELNGGLLTQNPSFIDVGWVLFVPMEIKGIKAPKQGKRQNLATIIGISSAAALLLMAAFLVFLLRRYKYYKNREEDPKAFAKPSSPQNQKFNKDIEGVTTFETERPVVYSIEEINEATSNFDEIRKIGEGGYGSVYFGILGKREVAIKKMKSSRTKEFFSELKVLCKIHHINVVELLGYASGEDHLYLVYEYIHNGSLNDHLHDPLLKGHQPLSWTARAHIALDAARGIEYIHDHTKTRYVHRDIKTSNILLDQGLRAKVADFGLARLVERSNEEEVIATCVVGTLGYIPPESVRELQMTSKTDVFAFGVVLAELITGLRAVIRDNREPNKMKSLISVIFGIFDQKNPETALEAIVDGNLRGSCPVEEVYKMAYLARQCLSEDPINRPEMKEIVQTLSQILISSMEWEASLGGKSQVFSALLNGR

SEQ ID NO: 159 - protein, 617 aa, Populus trichocarpa
MKMAAQNNRQFHLHHLYFLAIILTHVLSSNVFIESSSTMYPFSCSDQVQNCDSYLYHISEGLSIEQIASFYSVKSSNVEPITHGLKQDYLVSVPCTCKDVNGTQGYFYDTFYSVQSGDIFTNVTWVLYSGQAWEVPGVERLFIAGDMISVHLVCGCLEVEAKEIVTYTVQENDTLTGIAELLSAELTGIENLNERFTRNPNLIDVGWVLFVPREKNGIQAPKQGKQHNLAIILGTLSAVTLFSVCSLLLFLHRRNRNHKNRKEDPEVVNKAQSPTRTSLRTHFREKYIEDATFESERPIVYSLKEIDEATSQFDESRKIGAGGYGIVYIGTLKEREVAIKKMKSSRSKEFYSELKVLCKIHHINVVELLGYATGDNHLYLVYEYIQNGSLNDHLHDPLLKGHSPLSWLARAQIALDAARGIEYIHDHTKARYIHRDIKTSNILLDKGLGAKVADFGLARLVERSNEEDAVATRLVGTPGYIAPESVRELQMTSKTDVFSFGVVLAELITGQRALARDNGQPNKMKVLVAVMTAIFRDQDPETALEANIDENMKGSYPMDEVYKMAELSTHCMNEDPTNRPEMREIVQKLCKILMSSIEWEASLGGSSQVFTRLFDGR

SEQ ID NO: 160 - protein, 612 aa, Sclerocarya birrea
MASLNHQNYTLLLILLLITVFRSVLSHDVFVKSAIYPFDCANHIQTCNSYAYHISKGHSVEQIASFYSVNTSDITPISHGLKQDYLVSVPCSCEYVNGTQGYFYDTFYEVQPGDTFFNVADELYSGQAWEVAGAEEPFVVGDRSTIHLVCGCVEVESQEVVTYTVQEHGTLSGIAELLSADISGIEKLNQRLTQDPSFIDVGWVLFVPKEKRGIQAPRQGKGHSLILIVGLLSAATLFSACAFVLFFLRRNRNLESRKEDPEAVTKTPSAKKTSLQQHLHEQAIEATFESEIPVIYSLEEIDEATNNFDKNMKIGEGGYGSVYVGKLKEREVAIKKMKSSRSKEFLSELKVLCKIHHINVVELLGYASSDNHFYLIYEYVQNGSLNDHLHEPQLKGRSPLSWLERARIALDAARGIEYIHDHTKARYVHRDIKTSNILLDQGLKAKVADFGLARLVDRSNEEDFVATRLVGTPGSIAPESVRELQMTSKTDVFAFGVVLAELVTGQRALTRDNKEPNRMKSLISVMNTIFRAQDSEAALEANIDPNLGESYPMEEVYKMAELSKRCLSEEAANRPEIREMVETLSQILISSIEWEASLGGTSQVFTGLFKGR

SEQ ID NO: 161 - protein, 612 aa, Manihot esculenta
MKMASQNHHLLFFLLLATFFTNVISFNVVSKASLMYPLSCSQQIYTCNSYLYHISEGLTIDQIASFYSVNASDIQPISHGLKQDYLVSAPCTCKDVNGTRGYFYDTSYGVQAGDTFMNITRVLYSGQAWKVANEEELFVAGDRISIHLLCGCIQVQSQEIVTYTVQENDTLSGIAELLSANLSGIQGLNERLTRNPGYIDVGWVLFIPKEKNGVQAQKRGKRAHLTIILAVLSAVILCSVCTFILFLIKRIRNQKNGDHLKSVNKCQSPSRISLKSQFRKNDIEGVTFESERPVVYSVDEIEKATRNFDMSMKIGEGGYGSVYLGFLKEREVAVKKMKSSRSKEFYAELKVLCKIHHINVVELLGYASGDHHLYLLYEYIQNGSLSDHLHDPLLKGHTPLSWTARAQIAVDAAKGIEYIHDHTKSQYVHRDIKTSNILLDQGLRAKVSDFGLAKLVERSNEEEFIATRLVGTPGYIAPESVRELQMTCKTDVFAFGVVLAELITGQRALIRDTREPNKMRALVTIILTIFKKEDIETALEANIDGNLRGSYPMEAVCEMAETCRRCLSEDPLNRPEMREVVQTLSQILTASMEWEASLGGSSPEFTGVFVGR

SEQ ID NO: 162 - protein, 610 aa, Theobroma cacao; identical to SEQ ID NO: 9

SEQ ID NO: 163 - protein, 624 aa, Cucumis melo
VVSSSIFLLIFICSSTIICHPAAAASESNQTMYPMTCSRIKKCDASFYHVNKELQGEIEIAAAYSVNPSQLLPLRHKGVEDYLITAPCSCETADGVSGTAYFHDTSFRVGIGDTLSSVSNRNYSGQVWIFGDPLLDAGDVTGVKLLCGCIEDESKIVVTYTVQLHDTLSQIASSLWADADEIHSMNSKLIQDPELIVPGWVLFVPMYKNAYQTTKGSTKKHVWTIVIAVLSTLTLLSLGSLAIIFIRRKLKKSQRNNELESSKHHSKSHSITGTSSFQYPLSRAKSEAHKTSYRKEVSGFESEKTLIYSIEEIQEATANFDESRKIGEGGYGTVYHGVLNEQEVAIKKMKSNKSKEFFAELKVLCRIHHINVVELLGYASGDDHLYLVYEYVSNGSLSEHLHDPLKRGYQPLSWPSRTQIALDTAKGIEYIHDHTKSRYVHRDIKTSNILLDENLEAKVADFGLVKLLSRTNDEELVATRLVGTPGYLPPESVKELQVTPKTDVFAFGVVLAELITGRKALVRENQEPKRTKSLITLIYSIFQGENSEAELEAVVDENLHGSYPIEDVYKMGEIAAWCLNENPVGRPEMREIVALLSQLMTSAVEWEASLGGNSQVFSGLFTGR

SEQ ID NO: 164 - protein, 630 aa, Cucumis sativus
MASNAVVSPSIFLLIFICSSTIWDAAAVAAAFDSNQTMYPMSCSRIKKCDASFYHVNKGLEGENEIAAAYSVNPSQILPLPHKGVEDYLITAPCSCETADGVSGTAYFHDTSFRVGIGDTLSGVSNRNYSGQVWISGDPLLHVGDVTGVKLLCGCIEDESKIVVTYTVQLHDTLSQIASLLWADADEIHSMNAKLIQDPELIVPGWVLYVPMYKNAYQSTKGSTKKHVWTIVIAVLSTLTLLSLGSLAIIFIRRKLKKSHRKDELENSKHHSKSCSITGTSSFQYPLSKGKSEAHKMSSRKEVSGFESEKTLTFSIEEIQEATANFDESRKIGEGGYGIVYHGVLNEQEVAIKKMKSNKSKEFFAELKVLCRIHHINVVELLGYASGDDHLYLVYEYVPNGSLSDHLHDPLKRGFQPLSWPSRTQIALDTAKGIEYIHDHTKSRYVHRDIKTSNILLDENLEAKVADFGLVKLLSRTNDEELVATRLVGTPGYLPPESVKELQVTPKTDVFAFGVVLAELITGRKALVRENQEPKRTKSLITLIYSIFQGENSEADLEAVVDENLHGSYPIEDVYKMGEIAAWCLNENPVGRPEMREIVALLSQLMTSAVEWEASLGGNSQVFSGLFTGR

SEQ ID NO: 165 - protein, 535 aa, Cucurbita pepo
MVSNAVVSHSIFLLIFFCSSAISIPDSNQTMFPMTCSTIMKCDASLYHINNGQQTKSEIAAAYSVNPWQIQPIQRGGVQDYLITVPCSCESADGVSGTAYFHDTSFRVGTGDFLSDVSNRNYSGQVWIFGDPLLVAGEEFGVKLLCGCVEDESKIVVSYTVQSRDTLSQIASLLRADATEIHNLNAKLIEDPALIVPNWVLFVPMFKNAYQNTKGPTKKHVWTIVIAILATLTVVSLGTLAVIFIRRKLKKSKQNNDPQNSRAPSRSFSTFGTSSFQYPFSKPKSEAQKRSFRQDVSAFESEKTLIFTVEEIQEATANFDESRKIGEGGYGIVYHGVLNQQEVAIKKMKSNKSKEFFAELKVLCRIHHINVVCYQPLSWTTRTQIALDAAKGIEYIHDHTKARYVHRDIKTSNILLDESLGAKVADFGLVKLVGRTNDDELVATRLVGTPGYLPPESVKELQVTPKTDVFAFGVVLAELITGRRALIRDNQEPKRTKSLITLVIFLFLWENSEAALEAVVDGNLHGSYPMDDIYK

SEQ ID NO: 166 - protein, 623 aa, Cucurbita moschata
MVSNAVVSHSIFLLIFFCSSAICIPDSNQTMFPMICSTIMKCDASLYHINNGQQTKSEISAAYSVNPWQIQPIQRGGVQDYLITVPCSCESADGVSGTAYFHDTSFRVGTGDFLSDVSNRNYSGQVWIFGDPLLVAGEEFGVKLLCGCVEDESKIVVSYTVQSRDTLSQIASLLRADATAIHNLNAKLIEDPALIVPNWVLFVPMFKNAYQNTKGPTKKHVWTIVIAILATLTVVSLGTLAVIFIRRKLKKSKQNNDPQNSRAPSRSFSTFGTSSFQYPFSKPKSEAQKRSFRQDVSAFESEKTLIFTVEEIQEATANFDESRKIGEGGYGIVYHGVLNQQEVAIKKMKSNKSKEFFAELKVLCRIHHINVVELLGYASGDDHLYLVYEYVPNGSLSDNLHDPLKRGYQPLSWTTRTQIALDAAKGIEYIHDHTKARYVHRDIKTSNILFDESLGAKVADFGLVKLVGRTNDDELVATRLVGTPGYLPPESVKELQVTPKTDVFAFGVVLAELITGRRALIRDNQEPKRTKSLITLIYTIFQGENSEAALEAVVDGNLHGSYPMDDIYKMGEIAAWCLNEDPVGRPEMHEIVALLSQLMTSAVEWEASLGGNSQVFSGLFTGR

SEQ ID NO: 167 - protein, 569 aa, Helianthus annuus
MASQKRGFLLLVIVIVTSSLIHTIIALPNEFPFTCFKDSKPCNSILYQHNDLTEDSISSLYLVNKSQIQTIGQGDKRHHLVTVRCSCQNVKNTIAYFYDTIYPIKEHDTFLKVSNQFYSGQVWAIGDEGSNFPAGTNATMHLLCGCAETDSQVMVTYTVEPLDTLSDIADRLSAEVSEIESVNSALVQKTGFIEVGWVLYIPMYKNGAPSRKLKKGKDHKWAIIFGTLLSVVAVLLCVSIILMFMKRKRSKKHDNENLKAESKIMSFNKSVASTHTRYLSKESMEGQSSLQSSSRFIVSNNTTHEFNSGVYVYTGLTGFDTERPLIYDFNEIAEATNNFDDTRKIGEGGYGSVYFGILGEKEVAIKKMRSNKSKEFLAELKVLCKIHHINVVELLGFASGDDHLYLVYEFISNGSLSEHLHDPLLKGHQPLSWIARAQIALDAAKGIEYIHDHTKERYVHRDIKTSNILLDDRLRAKVADFGLAKLVGRTNDDDFVATRLVGTPGYLPPESVKELHVTTKTDVFAFGVVLAELITGKRALMRDNREPNKMKSLITVVSLYWKKFNILAR

SEQ ID NO: 168 - protein, 610 aa, Helianthus annuus
MLMASSTHFLYLTFFIASFTQVFPLNEVMKSSLMYPLTCSDYTHTCDSYLYHISKGHKLDEIASFYSVNTSRITPVNHQSNLDYLVSVRCACEKDNNGNGYYLYDSVYKRKPGEGVRYISDEYYSGQVWYVSGEDEEQLTLHLVCGCLDDESRKVVTYTIQAQDTLLGISQLLSAKENEVENLNKALTQDPNYMDIGWVLFVPQENNRIRTSKKSRMKTWKLIIFIVVALVLVTSAFVVLFLHRKRRARKIKANESKTIRNEVTGGKTTLENHFFNVDMEEAASNIESEKPVIISLEEIEQATNSFDEARKIGEGGYGSVYFGIIRQREAAIKKMRSNKSKEFFAELKVLCRIHHNNVVQLLGYASGDNHLYLVYEYVPNGTLSDHLQDPLLKGHQPLTWTARANIALDAARGIEYIHDHTKARYVHRDIKTSNILLDLGLKAKVADFGLTKFIERANEDELVATRVVGTPGYLAPESISEMQTTSKTDVFAFGVVLAELITGQKALARDKQEPNKLKTLVSVIRVIFQDQDSSAALESQIDTNLKGSYPIEEIHKMAETAFQCLSEDPANRPEMRNVVTILGQIVMASIEWEASLGGSSQVFSGVCDGR

SEQ ID NO: 169 - protein, 649 aa, Setaria italica
MSFSYGPNHVELQGSGFNKEQQLQLYDNWLCQAIDIPGSPSLFLQHHHTSASLIDSRKSIASTAEWQPMHCNAVSINPSCNSFLYVTPEGRNLSETISVFNGNASLIQPIKRLSGSEDLLMGVPCMCEAINNTLTAFFHDTQYKVEEHDTPDTVKINKFSGLAMDVGDGKVLIANDMDTITVHLPCGCSSTASDGVLSYAVQEEDTLSTIASLFRSSSQDILNLNPSVKNPDFIKPGWILFIPMGSSGSSKKKIGSLSIIIAVSISAAILLLCVFTVILRLKRRSSQHNVEAPEIKMERAPSNTSIAALESRFFPSMRITDIDPFQTERPVIFSLKIVGDATANFDEKRKIGEGGYGSVYLGFIGAHEIAIKKMKASKSKEFFAELKVLCKVHHINVVELIGYAAGDDHLYLVYEYVQNGSLNDHLHDPLLKGHQPLSWTARTQIALDSARGIEYIHDHTKDCYVHRDIKTSNILLDNGLRAKVADFGLVKLVQRSDEEECVATRLVGTPGYLPPESVLELHMTTKSDVYAFGVVLAELITGLRALMRDNKEVNKMKSLISIMRKAFKSDDLESSMETIIDPNLKDNYPIEEVCKMANISMWCLSEDPLNRPEMRDIMPTLSQIHLTSIEWEASLGGDAEVFSGVSTGR

SEQ ID NO: 170 - protein, 615 aa, Sorghum bicolor
MAKHGFLFFLTLFLQHHYTSASSIDQQQSRLASTSEWQPLHCDAVSINPSCGSFLYVTPQGRSLSEIVSVFNGNASLIQTINRLSGSQDLLMGVACKCQAISNTTTAFFHDTQYKVEPDDTPGEVKSNTFSGLAMNVGDGSELTPGNTITVHLPCGCSSTASEGILSYSVQEEDTLLTIANLFHSSPQDILNLNPSVTNPDFIKPGWILFIPMGVAGPSKKSVGSMTIIISASISAAILFFCVFTVILRLRRRSSQHTVEAPEIKMERAPSNTSIAALESRYFPSMRINDIDPFQTERPVIFSLKVIGDATANFDEKRKIGEGGYGSVYLGFIGAHEIAIKKMKASKSKEFFAELKALCKVHHINVVELIGYAAGDDHLYLVYEYVQNGSLSEHLHDPLLKGHQPLSWTARTQIALDAARGIEYIHDHTKACYVHRDIKTSNILLDNGLRAKVADFGLVKLVERSDEEECMATRLVGTPGYLPPESVLELHMTTKSDVYAFGVVLAELITGLRALIRDNKEVNKMKSIISIMRKVFKSENLESSLETIIDPNLKDCYPIEEVCKMANVSIWCLSEDPLNRPEMRDIMPTLCQIHLTSIEWEASLGGDVSMDSEAS

SEQ ID NO: 171 - protein, 606 aa, Zea mays
MTKHGLLFFLAIALLLHRHYTSASSTGQPTRSSSTASRSTAEWQPLHCSPVSSCGSFLYVTPGGRNLSEIASVFNGNASLIQPVKRLSGSEDLLMAVACECQAISNTTTAAAFLHDTQYKVEPDAIPDDVKSNTFSGLAMDVGDGFPLTPGATVTVRLPCGCSSSTASKGVLSYSVQEEDTLSTIASLFSSSPEAILNLNPSVKNPDFIKPGWILFVPMGVAGSSKKKRVGSTTITIAASVSAIILSVCVLTVILRLRRRPSQQNAEAPEIKMERAPNIDPFQTERPVIFSLKVVGDATANFDEKRKIGEGGYGSVYLGFIGTHEIAVKKMRASKSKEFFAELKALCKVHHINVVELIGYAAGDDHLYLVYEYVQNGSLSEHLHDPLLKGHQPLSWTARTQIALDAARGIEYIHDHTKACYVHRDIKTSNILLDNGLRAKVADFGLVKLVERSDEEEWVATRLVGTPGYLPPESVLELHMTTKSDVYAFGVVLAELITGLRALIRDNKEVNKTKSIISIMRKAFDSEDLERSLETIIDPNLKDSYPIEEVCKMANVSMWCLSEDPLNRPEMRDTMPALCQIHLASIEWEASLGGDGEVFSGVSYGR

SEQ ID NO: 172 - protein, 629 aa, Zea mays; identical to SEQ ID NO: 12

SEQ ID NO: 173 - protein, 577 aa, Brachypodium distachyon
MQCAPQSLIPSCNSYLYVTPQGRSLSEIASDFKGNASLIQPIKRLSGSEDLLIPVPCMCEAINATVNALFHDTGYEAIQNDISDDINSNKFSGLAWNLTAGLNKGDTITVHLLCGCSSTAPEGVLSYTVQPEDTLSNIATLFSSGSREILSLNPAVRNPDFIKPGWVLFIPMGVAASSNKKIGGLPIIIAVSISAAVSLLCMSIIILRLKRRSPLPSVEAPKNKMEKVPSNTSIAILESRYFPSKRIDEIDPFQTERPVIFSLKEVGDATVNFDEKRKIGEGGYGMVYLGFIGTHEIAVKKMKASKSKEFFAELKVLCKVHHINVVELIGYAAGEDHLYLVYEYVRNGSLSEHLHDPLLKGHQPLSWTARTQIAMDAARGIEYIHDHTKACYVHRDIKTSNILLDDGLRAKVADFGLVKLVERSDEDDCLATRLVGTPGYLPPESVLELHMTTKSDVYAFGVVLAELITGLHALVRDNKEANKTKSLISIMRRAFKSEYLESSLEKIIDPSLKDNYPIEEVCKLANISMWCLSEDPLDRPEIREIMPVLSQIHMTSIEWEASLGGDTEVFSGVFNGR

SEQ ID NO: 174 - protein, 612 aa, Hordeum vulgare; identical to SEQ ID NO: 15

SEQ ID NO: 175 - protein, 550 aa, Oryza sativa
MSKHGFLFFLLFFVQHLHTIISLLDSPGGSLASLPEWQPMPCKSVSVNPLCSSYLYVTPEGRNLSKVASDFSGNASLFQRITRLSGSEDLLVNVPCVCEAINATMTGLFHDTNYRVKDGDMGDIINSKTFSGLALNVGDGQILHKEEKLIIHLPCGCSSTAPEGVLSYAVQDGDTLGNIASLFRSSWKDILDLNPRVANPDFIKPGWILFIPMGVAGPSNKKIDPFQTERPVIFSLRAIEDATSNFDEKRKIGEGGYGSVYLGFIGTHEIAVKKMKASKSKEFFAELKVLCKIHHINVVELIGYAAGDDHLYLVYEYVQNGSLSEHLHDPLLKGHQPLSWTARTQIAMDSARGIEYIHDHTKTCYVHRDIKTSNILLDNGLRAKVADFGLVKLVQRSDEDECLATRLVGTPGYLPPESVLELHMTTKSDVYAFGVVLAELITGLRALVRDNKEANKTKSLISIMRKAFKPEDLESSLETIVDPYLKDNYPIEEVCKLANISMWCLSEDPLHRPEMREVMPILAQIHMASIEWEASLGGDGEVFSGVSNGR

SEQ ID NO: 176 - protein, 604 aa, Musa acuminata
MAVWWHTSLLLFIFLLLPHGEADVQAVNPMECPKPSPVPACSAFLYVVPRGHNASDTAARYSADASLVEPIRRPSGATDFLVAVPCACEAAGNATALFHDTVYLVQPHDTASGVTDVVFSGLAWRVPENITDFASITVRLPCGCSETTVVSYAVQSGDTLTSISELLDSDVEAIKAMNPELMPNPDFLNPGQLLFVPMGVHESGMQKTAIIILGVSLSVLFMVFGGLSIWLYRRRRRDESTAESLNVTVSKNSSARFITALQSQLLPSKSGEGTATFMSERPVTFSLEEVDRATASFHDSRKIGEGGYGSVYLGILGTQEVAIKKMKSSKSKEFFAELNVLCKVHHRNVVELIGYAAGDDHLYLVYEYLQNGSLSDHLHDPLLKGHQPISWTARTQIGLDAARGIEYIHEHTKATCVHRDIKTSNILLDSVLRAKVADFGLAKLVEQSDEDWCFATRLVGTPGYLPPESVRELQMSTKSDVFAFGVVLAELVTGERALIPDKKDACKMRSLVTAVSAMKEVSASDDPNAALEEIIDRNLDHVYPTEEVRKMVDVAMWCLSDDPVSRPEMREITTNLSQIVMASIEWEASLGGNSQVFSGIFTGR

SEQ ID NO: 177 - protein, 485 aa, Populus trichocarpa
MTSHNFLLGLLITLMATLVALGFASDDSTNSPNMYPFTCSDSEDIKICNASLYHTNYDSLQKEQLASIYGVSPAQIISISYASRQDYLVTVPCSCKNINGTVGYFYDAIHNVSQGELFSNVSAQIFNGQAWWVEDEAWLFNPRNNFSMHLLCGCTKSKSQIVVTYTVQQHDTLSDISTRLSSTVGGIQSMNINLIKNPSSINVDWVLFVPMDSKPASGKGSGRGHKWIIIVGILSSLTALSIITLVILLLRRKGCRQNSEEDLKPVPKSMSTNRAFSLQSLYKGSNEDGTAFESEKPVVFSLEEIEEATKSFDKTKKIGEGGYGCVYHGLLRGQEVAVKKMRSNKSHEFFAELKVLCKIHHINVVELLGYAGGDDHFYLIYEYVRNGSLSDHLHDPLLKGHQPLSWTARAQIALDAAKGIEYIHDHTKARYVHRDIKTSNILLDEGLRAKVADFGLAKLVERTSDEDLIATRLVGTPGYLPPDFS

SEQ ID NO: 178 - protein, 624 aa, Dendrobium catenatum
MIVFFLSSPVPSPPLRSPNHNKSMPFHHRHPFLLFLLSISSISLASAGNSSFPILCKTPSSSPTCNSFLYAQSQNLPVSTVAAIYSANASLSRNLTRSTGITDYLLQVPCTCTATSQGTTALFYDTNYRVIAGDTADYITSSVFSGLAWNIDPGLQAGQLITVHLPCGCLPGGEAMIVSYAVETGDTLLKIAEMFSADTIETVKMNSQLAANPDFLNLGWLLFVPMGTAARRRSGRGFLLALAITIPVILLMLCMLVLLFLWRRQSHRKLQEKQMKRSVSAKSGLAMLESQYNLDGDKAFESDRPLIFSLEEVERATANFDSSRVIGVGGFGSVYYGMLGDKEVAIKKMKSNMSKEFFAELKVLCRVHHINVVELIGFASGDDHLYLVYEFLQNGSLSDHLHDPLLKGHQPLSWTARAQIALDTARGIEYIHDFTKSRYVHRDIKTSNILLDNCLRAKVGDFGLAKLVERSSEDDLIATKLVGTPGYLPPESLLEFQTSTKTDVFAFGVVIAELITGRRALTRDSKEATKMKSLVPVMKAVFIGEDPERGIEEIVDGNLRSSFPMESVFKMAEIAAWCLSDDPLNRPEISETIVKLSQILSASIEWEASTGGSGEVFSGVLNGR

SEQ ID NO: 179 - protein, 597 aa, Apostasia shenzhenica
MIKLPLFLLLLLLAVAGGQNFTVPTPCRQSSATPTCSSLLYAQSGNLSLPDLAAVFSANASLARPISRPSGGAGGYLLEVPCLCSAAGGGELALFHDATYLVKSGDTADDITANVFSGLAWKIDAGLKAGETITVHMPCGCLDRQVEVASYAVEKGDTLSTIAGMLAADLEETKRMNSELVANPNFLSVGWILLVPVGTAVPAVSGRKKNVVLALVIAIPVVISIAGLLILLVRYWGIRRRRLLEEEGKKTTAKSASSKKNHSQRNLEEGKAFESERPEIFSVEEVEKAASNFDPSRVIGVGGFGSVYYGMLGEKEVAIKRMKSNKTKEFFAELKVLCKVYHINVVELIGYASGDDHLYLIYEYLQNGSLSDHLHDPLLRGHQPLSWTARAQVALDAARGIEYIHDHTKSRYVHRDIKTSNILLDIGLRAKVGDFGLAKLVERSNDEELNATRLVGTPGYLPPEALVECQTSTKTDVFAFGVVIAELITGCRPLVRDHKEPAKTQSLITLIKKIFQEEDAEEALEEMVDRNLRNSYPMEAIFKMAEVAIRCLDDDPGNRPEMSEITVKLSQILTASIEWEASLGGSGEVFSGVVAGR

SEQ ID NO: 180 - protein, 446 aa, Carica papaya
MAFPDLLFCLIFSLLATLIFTTTADEASNETYIVDPLPCSKGINTCNASLYHENTGLQKEQIASYYSVPQSNINPIRRGNEEDYLITVTCSCKDINGTKGYFYDASYEVQKGDTLLGVSDRIYSGQTWTNESFEVGNTVSMHLMCGCVERDSQIMVTYTVQRGDTLSDIATLLSAEVSAIESMNRNLSTNPGFIDVGWVLFVPKEKNGIPKKGRMQKWAIIVGVLAAVTLLLMVALITILLWRKITEKSSKEDPKGTTKSLSSNRAYSFQSQRAASKSNVPIENIEDMTAFESERPVIFNLEEIEEATCNFEATKKIGEGGYGSVYFGVLGENELQVTPKTDVFAFGVVLAELITGQRALTRDNRESNKMKSLITVIYRVFQDENPESALEVVVDGNLRSSYSMEDLYKVSLTYLVHVSLVNKTDKCSLGRVMISTEILQELVMNN

SEQ ID NO: 181 - protein, 285 aa, Quercus robur
MASLGLLIHLLLLATLFARILAAKLPITSTLVSPFRCNTLIKSCNASLYHISNTVPKEKVASFYSVNVSQMKPIMYGNNIQDYLISVPCSYMDLDDNTTAYFYNTSYPVQHGDTFDKVSIEIYSGQAWKGKANYSYLDPKNNLSISLPCGCIESQSQTVVTYTVQDKDILLSIASLLSSDVTGIQSLNQEMVLNPSNIGLGWVLFVPMENNPKKADFGLEKLVGRTNEEDFLATRLVGTPGYLPPEAVKELQVTPKTDVFAFGVVLAELITGQRALICDSKETNK

SEQ ID NO: 182 - protein, 556 aa, Citrus clementina; identical to SEQ ID NO: 133

SEQ ID NO: 183 - protein, 562 aa, Prunus persica
MASLHHLPCLLLSLWLTQFPAGFASDASIKATFINPLSCSAKIMTCNASLYHINISLNKEQIASFYSVFPSEVNPIKHNSKQDYLISVPCSCKNISGTVGYFYDTTYKVKPSDTFYDVSNQIYSGQPLSVKEELPKFVPEANFPIHLPCGCVESDSQIVVTYTVQEHDTLSDIGILLSAKIDNIENMNKNMTENPSFIVVGWVLFVPMEKNGLKTSKTGIRPKWIILIGIILAVTLLSICTLILLLYRRRTPEKKVEVPNKSVSRSSKSLAAHRSFSLHNQLLHKENMEDGPVFESDGPVIFGVEQIEEATGYFDETRKIGEGGYGSVYFGVIGEKEIAVKKMKSNSTKEFFAELKVLCKIHHINVVELLGYASGDDHLYLVYEYVQNGSLSEHLHDPLLKGHQPLSWTARTQIALDAAKGIEYIHDHTKARYVHRDIKTSNILLDEGLRAKVADFGLAKLVGRTNEEDIIATRLIKKIFQDEDPESALEAATDGNLRSNYPMEDIFKMAEIAEWCLSEEAVERPEMREIVVMLSQIMVSSIEWEASLGGNSQVFSGVFNGR

SEQ ID NO: 184 - protein, 575 aa, Prunus mume
MTCNASLYHINISLNKEQIASFYSVFPSEVNPIKHNSKQDYLVSVPCSCKNISGTVGYFYDTTYKVKPSDTFYDVSNQIYSGQPLSVKEELPKFVPEANFPIHLPCGCVESDSQIVVTYTVQEHDTLSDIGTLLSAKLENIENMNKNMTEKPSFIVVGWVLFVPMEKNGLKTSKTGIRHKWMILIGITLAVTLLSMSTLILLLYRRRTPEKIVEVPNKSVSRSSKSLAVHRSFSLHNQLLHKENMEDGPVFESDGLLIFGVEQIEEATGYFDETKKIGEGGYGSVYFGVIGEKEVAVKKMRSNSTKEFFAELKVLCKIHHINVVELLGYASGDDHLYLVYEYIQNGSLSEHLHDPLLKGHQPLSWTARTQIALDAAKGIEYIHDHTKARYVHRDIKTSNILLDEGLRAKVADFGLAKLVGRTNEEDIIATRLVGTPGYLPPESVKELQVTHKTDVFAFGVVLAELITGQRALFRDNREPEKMKSLIIVIKKIFQDEDPESALEAATDGNLRSNYPMEDIFKMAEIAEWCLSEEAVERPEMREIVVMLSQIMVSSIEWEASLGGNSQVFSGVFNGR

SEQ ID NO: 185 - protein, 618 aa, Sorghum bicolor
MAKHGFLFFLTLFLQHHYTSASSIDQQQSRLASTSEWQPLHCDAVSINPSCGSFLYVTPQGRSLSEIVSVFNGNASLIQTINRLSGSQDLLMGVACKCQAISNTTTAFFHDTQYKVEPDDTPGEVKSNTFSGLAMNVGDGSELTPGNTITVHLPCGCSSTASEGILSYSVQEEDTLLTIANLFHSSPQDILNLNPSVTNPDFIKPGWILFIPMGVAGPSKKSVGSMTIIISASISAAILFFCVFTVILRLRRRSSQHTVEAPEIKMERAPSNTSIAALESRYFPSMRINDIDPFQTERPVIFSLKVIGDATANFDEKRKIGEGGYGSVYLGFIGAHEIAIKKMKASKSKEFFAELKALCKVHHINVVELIGYAAGDDHLYLVYEYVQNGSLSEHLHDPLLKGHQPLSWTARTQIALDAARGIEYIHDHTKACYVHRDIKTSNILLDNGLRAKVADFGLVKLVERSDEEECMATRLVGTPGYLPPESVLELHMTTKSDVYAFGVVLAELITGLRALIRDNKEVNKMKSIISIMRKVFKSENLESSLETIIDPNLKDCYPIEEVCKMANVSIWCLSEDPLNRPEMRDIMPTLCQIHLTSIEWEASLGGDGEVFSGVSYGR

SEQ ID NO: 186 - protein, 621 aa, Solanum lycopersicum; identical to SEQ ID NO: 69

SEQ ID NO: 187 - protein, 657 aa, Brassica napus
MTLATSTFWVLSFFTLWNLSSSEPMNCSDTSRLCTSFLAFKPNQNQTFSIIQSMFDALPSDITADAASGDVYVRKNCSCLTTTPHQYATNTTFTIRQNRSSVSDAVVSDYSGLAFPLNSTREARPGAVVSVQLLCGCSSGLWNYLMSYVTVNGDSVQSLSSRFGVSMDRIEEVNGISSPDYITTGDLIYIPLDSVPGVPYETKKINPPAPSPALTNINISAADQVNHTSKGGGHVPYIWIVGGLTVVLALLVICILVCICLRSSSCSSNDEDSGGGHSFQILRKSGLFCGSGRYNCCRSGDLRQTNSETQRNHQVVAIPKALGDGMFEIEKPTVFTYEEIRDATDGFADSNLLGHGNYGSVYFGLLREQEVAVKRMTATKTKEFAAEMKVLCKVHHSNLVELIGYAATSDELFVVYEYVQKGMLKNHLHDPQSKGNTPLSWIMRNQIALDAARGLEYIHEHTKTHYVHRDIKTSNILLDEAFRAKISDFGLAKLVEKTGEGEVSVTKVVGTYGYLAPEYLSDGRATSKSDVYAFGVVLFEIISGREAVIRTEAMGTKNPERRPLASTMLAALKNSPDSMNMTSLKEFVDPNMVDLYPHDCLFKIAMLAKQCVDDDPILRPNMKQVVISLSQILLSSIEWEATLAGNSQVFSGLVQGR

SEQ ID NO: 188 - protein, 14 aa, Lotus japonicus
PISHGKENKHKLEK

SEQ ID NO: 189 - protein, 64 aa, Artificial Sequence
  Synthetic Construct
  VARIANT 5: Xaa = N, K, R, S, P, G, T, or Q
  VARIANT 12: Xaa = N, H, V, L, or none
  VARIANT 29: Xaa = K, N, S, Q, or T
  VARIANT 41: Xaa = L, V, P, T, S, R, I, or A
  VARIANT 48: Xaa = T, I, M, K, L, or A
MEPFXCSAAKSXNIRTCNSSLYHISYGLXIEEIASFYSVNXSQIKPIXRGSTKQDYLVSVPCSC

SEQ ID NO: 190 - protein, 60 aa, Artificial Sequence
  Synthetic Construct
  VARIANT 29: Xaa = N, T, W, G, D, or S
  VARIANT 31: Xaa = F, V, I, L, M, N, T, or none
  VARIANT 41: Xaa = E, G, R, A, N, or none
  VARIANT 47: Xaa = V, D, I, K, H, T, or none
KNINGTMSGYFYDTTYKVKPNDTFVNVNXLXYSGQAWNVNXELSTFXANETITIHLPCGC

SEQ ID NO: 191 - protein, 60 aa, Artificial Sequence
  Synthetic Construct
  VARIANT 32: Xaa = E, D, T, S, Q, K, or R
  VARIANT 35: Xaa = V, E, or L
  VARIANT 37: Xaa = V, M, I, L, or Y
  VARIANT 39: Xaa = S, Q, E, K, R, I, P, or A
  VARIANT 43: Xaa = P, Q, R, E, K, A, or none
  VARIANT 46: Xaa = T, S, N, E, or D
  VARIANT 58: Xaa = K, R, S, M, or I
  VARIANT 60: Xaa = L, K, I, or none
SEKSESQIVVTYTVQENDTLSSIATLLSATLXGIXSXNXVLTXNPXFIDVGWVLFVPXEX
